(19) United States
(12) Patent Application Publication
(10) Pub. No.: US 2021/0340557 A1
(43) Pub. Date: Nov. 4, 2021

(54) BEET NECROTIC YELLOW VEIN VIRUS (BNYVV)-RESISTANCE MODIFYING GENE

(71) Applicant: KWS SAAT SE & Co. KGaA, Einbeck (DE)

(72) Inventors: Ann-Katrin MÜNNEKHOFF, Einbeck (DE); Britta SCHULZ, Einbeck (DE); Daniel Fabian STIRNWEIS, Gottingen (DE); Ottó TÖRJÉK, Einbeck (DE); Dietrich BORCHARDT, Einbeck (DE)

(73) Assignee: KWS SAAT SE & Co. KGaA, Einbeck (DE)

(21) Appl. No.: 17/274,692

(22) PCT Filed: Sep. 11, 2019
(86) PCT No.: PCT/EP2019/074285

§ 371 Date: Mar. 9, 2021

(30) Foreign Application Priority Data
Sep. 11, 2018 (EP) 18193892.9

(51) Int. Cl. C12N 15/82; C07K 14/415; C12Q 1/6895

(52) U.S. Cl. CPC C12N 15/8283; C07K 14/415; C12Q 2600/156; C12Q 2600/13; C12Q 1/6895

(57) ABSTRACT

A method for establishing, restoring or increasing the Rz2 gene mediated resistance to the Beet necrotic yellow vein virus (BNYVV) in the target plant is enabled via the identification and provision of a gene which modulates said resistance according to the invention. In particular, the BNYVV resistance mediated by the Rz2 resistance gene depends on the presence of the gene of the present invention. The gene being involved in conferring said resistance, and embodiments of the present invention that are described in the preceding, offer additional applications, e.g., the use of the resistance modifying gene allele in cis-genetic or trans-genetic approaches, with the goal of developing new resistant cultivars.

### FIELD OF THE INVENTION

[0001] The present invention relates to a nucleic acid molecule which encodes a polypeptide, which is involved in Rz2 resistance gene mediated resistance against Beet necrotic yellow vein virus (BNYVV) in a plant in which the polypeptide is expressed as well as to a nucleic acid molecule which encodes a non-functional allele of the polypeptide, which interferes with said resistance against BNYVV in a plant in which the polypeptide is expressed. The present invention further relates to the corresponding polypeptides encoded by the nucleic acid molecules according to the invention. Furthermore, the invention relates to a plant, plant cell, plant organ, plant tissue, plant part, or a seed or descendant of a plant, which comprises any one of the nucleic acid molecules or portions thereof as an endogenous gene or as a transgene. Furthermore, the present invention also encompasses methods for conferring, restoring or increasing the resistance to BNYVV in a plant of the species Beta vulgaris comprising the Rz2 resistance gene, as well as methods for producing or identifying and possibly selecting a BNYVV-resistant plant. The present invention also encompasses methods for cultivating plants of the species Beta vulgaris counteracting an infestation of the cultivated plants with BNYVV as well as to oligonucleotide probes and primers for specific hybridization with any one of the nucleic acid molecules according to the invention.

### BACKGROUND OF THE INVENTION

[0002] Rhizomania is the most economically important sugar beet disease worldwide, which can cause yield losses of 50% or more. The disease, also called “root madness”, is caused by the Beet necrotic yellow vein virus (BNYVV) and transmitted by the soil-borne fungus Polymyxa betae. BNYVV infection manifests itself in an increased proliferation of the thin roots and lateral roots and in the formation of a strongly reduced root body with reduced sugar content. Infected plants show a reduced water absorption and are therefore more sensitive to drought stress. When the infection spreads to the entire plant, the leaf veins become yellow, with necrotic lesions and yellow spots on the leaves. Since curative control of the disease is not possible, as with other viral diseases, damage can only be prevented by cultivating resistant varieties. Three major genes are currently under investigation against rhizomania: Rz1 (also known as “Holly”), Rz2 and Rz3.

[0003] The Rz2 resistance gene, which was identified and described in international patent application WO 2014/202044 A1 originates from the Beta maritima accession WB42 and is known to provide an elevated resistance to rhizomania in comparison to Rz1 when expressed in several varieties of sugar beet. Furthermore, it is known that Rz3 from Beta maritima accession WB41 has been identified, which is most probably the same or a very similar allelic variant of Rz2.

[0004] However, in the course of development of new sugar beet varieties, it has been observed that certain genetic backgrounds lead to a weakening or loss of resistance, although the resistant allele of Rz2 or Rz3 is present. So far, nothing is known about the molecular genetic background leading to the observed effect. However, in order to make the resistance effect mediated by Rz2 or Rz3, respectively, usable in all genetic backgrounds, there is a high demand among plant breeders of the genus Beta to prevent the observed reduction or loss of resistance.

[0005] In particular, the aim is to identify the mechanism behind the observed reduction or loss of resistance and to use it in order to establish sugar beet lines which show a stable resistance to rhizomania based on Rz2 and Rz3, respectively. According to the invention, this aim is achieved via the embodiments characterized in the claims and in the specification.

### SUMMARY OF THE INVENTION

[0006] The present invention relates to a nucleic acid molecule which encodes a polypeptide, which is involved in resistance against Beet necrotic yellow vein virus (BNYVV) mediated by the Rz2 resistance gene in a plant as well as to a nucleic acid molecule which encodes a non-functional allele of the polypeptide, which interferes with said resistance against BNYVV in which the polypeptide is expressed. The polypeptide which is encoded by any one of the nucleic acid molecules is thereby produced in the plant.

[0007] Furthermore, the invention relates to a plant, plant cell, plant organ, plant tissue, plant part, or a seed or descendant of a plant, which endogenously or transgenically comprises any one of the nucleic acid molecules or portions thereof. According to a specific optional embodiment, those plants and their components that have been obtained via an essentially biological process are exempted.

[0008] Methods for conferring, restoring or increasing the resistance to BNYVV in a plant of the species Beta vulgaris comprising the Rz2 resistance gene, as well as methods for producing or identifying and possibly selecting a BNYVV-resistant plant, are likewise encompassed by the present invention. The present invention also encompasses methods for cultivating plants of the species Beta vulgaris counteracting an infestation of the cultivated plants with BNYVV as well as oligonucleotide probes and primers for specific hybridization with any one of the nucleic acid molecules according to the invention.

[0009] The present invention therefore relates to the embodiments that are listed in the following points [1] through [29] and illustrated in the Examples and Figures.
[0010] [1] A nucleic acid molecule encoding a polypeptide which is involved in resistance against Beet necrotic yellow vein virus (BNYVV) mediated by the Rz2 resistance gene in a plant in which the polypeptide is expressed, wherein the nucleic acid molecule comprises a nucleotide sequence which is selected from the group consisting of:
   [0011] (a) a nucleotide sequence that encodes a polypeptide having the amino acid sequence according to SEQ ID No. 45;
   [0012] (b) a nucleotide sequence that comprises the coding DNA sequence according to SEQ ID No. 44
   [0013] (c) a nucleotide sequence that hybridizes with a complementary sequence of the nucleotide sequence according to (a) or (b) under stringent conditions;
   [0014] (d) a nucleotide sequence that encodes a polypeptide which, via substitution, deletion, and/or addition of one or more amino acids of the amino acid sequence, differs from a polypeptide that is encoded by the nucleotide sequence according to (a) or (b);
   [0015] (e) a nucleotide sequence that encodes a polypeptide which has an amino acid sequence that is at least 70% identical to the amino acid sequence according to SEQ ID No. 45; and
   [0016] (f) a nucleotide sequence that comprises the coding DNA sequence which is at least 70% identical to the DNA sequence according to SEQ ID No. 44,
   [0017] wherein the amino acid sequence of the encoded polypeptide has a proline (P) at position 25 with reference to SEQ ID No. 45, a proline (P) at position 72 with reference to SEQ ID No. 45 and/or a valine (V) at position 186 with reference to SEQ ID No. 45, or
   [0018] wherein the nucleic acid of the coding DNA sequence has a cytosine (c) at position 73 with reference to SEQ ID No. 44, a cytosine (c) at position 214 with reference to SEQ ID No. 44, and/or a guanine (g) at position 556 with reference to SEQ ID No. 44.
[0019] [2] The nucleic acid molecule according to [1], wherein the polypeptide has the amino acid sequence of SEQ ID No. 8, 12, 16, or 20, or the nucleotide sequence that encodes said polypeptide is SEQ ID No. 5, 6, 7, 9, 10, 11, 13, 14, 15, 17, 18 or 19, or the coding DNA sequence is a nucleotide sequence according to SEQ ID No. 7, 11, 15, or 19.
[0020] [3] A nucleic acid molecule which specifically hybridizes to the nucleic acid molecule according to [1] or [2] and encodes a non-functional allele of the polypeptide, which interferes with resistance against BNYVV mediated by the Rz2 resistance gene in a plant in which the polypeptide is expressed, wherein the nucleic acid molecule preferably comprises a nucleotide sequence which is selected from
   [0021] (a) a nucleotide sequence that encodes a polypeptide having an amino acid sequence according to SEQ ID No. 4 or a polypeptide having an amino acid sequence that is at least 70% identical to SEQ ID No. 4, wherein the polypeptide comprises an amino acid sequence having at least one amino acid substitution due to one or more mutations in the nucleotide sequence, preferably wherein proline (P) at position 25 with reference to SEQ ID No. 45, proline (P) at position 72 with reference to SEQ ID No. 45, and/or valine (V) at position 186 with reference to SEQ ID No. 45 is substituted with another amino acid; and/or
   [0022] (b) a nucleotide sequence that comprises the coding DNA sequence according to SEQ ID No. 3, that comprises a coding DNA sequence which is at least 70% identical to the DNA sequence according to SEQ ID No. 3, or that hybridizes with a complementary sequence of SEQ ID No. 3 under stringent conditions, wherein the nucleotide sequence comprises at least one nucleic acid substitution due to at least one mutation leading to an amino acid substitution, preferably wherein one or more nucleotides are substituted at positions 73-75 with reference to SEQ ID No. 44, at positions 214-216 with reference to SEQ ID No. 44 and/or at positions 556-558 with reference to SEQ ID No. 44.
[0023] [4] The nucleic acid molecule according to [3], characterized in that the encoded polypeptide comprises an amino acid sequence having
   [0024] (i) alanine (A) instead of proline (P) at position 25 with reference to SEQ ID No. 45,
   [0025] (ii) threonine (T) instead of proline (P) at position 72 with reference to SEQ ID No. 45, and/or
   [0026] (iii) isoleucine (I) instead of valine (V) at position 186 with reference to SEQ ID No. 45.
[0027] [5] The nucleic acid molecule according to [3] or [4], characterized in that the nucleic acid molecule comprises a DNA sequence having
   [0028] (i) guanine (g) instead of cytosine (c) at position 73 with reference to SEQ ID No. 44,
   [0029] (ii) adenine (a) instead of cytosine (c) at position 214 with reference to SEQ ID No. 44, and/or
   [0030] (iii) adenine (a) instead of guanine (g) at position 556 with reference to SEQ ID No. 44.
[0031] [6] The nucleic acid molecule according to any one of [3] to [5], characterized in that the nucleic acid molecule comprises a coding DNA sequence having in addition
   [0032] (i) adenine (a) instead of guanine (g) at that position 72 with reference to SEQ ID No. 44, and/or
   [0033] (ii) adenine (a) instead of guanine (g) at position 111 with reference to SEQ ID No. 44.
[0034] [7] A polypeptide which is encoded by the nucleic acid molecule according to [1] or [2] or any one of [3] to [6].
[0035] [8] A vector or expression cassette which comprises the nucleic acid molecule according to [1] or [2] or any one of [3] to [6], preferably wherein the nucleic acid molecule according to [1] or [2] or any one of [3] to [6] is operably linked to a heterologous regulatory element, preferably wherein the regulatory element is a promoter.
[0036] [9] A cell which comprises the nucleic acid molecule according to [1] or [2] or any one of [3] to [6], a polypeptide according to [7], or a vector or expression cassette according to [8].
[0037] [10] A plant or a portion thereof comprising the nucleic acid molecule according to [1] or [2] endogenously or transgenically or the vector or the expression cassette which comprises the nucleic acid molecule according to [1] or [2] as defined in [8] as transgene.
[0038] [11] A plant or a portion thereof according to [10], characterized by comprising additionally the Rz2 resistance gene mediating BNYVV resistance endogenously or transgenically.
[0039] [12] Seed or a descendant of the plant according to [10] or [11], wherein the seed or the descendant endogenously or transgenically comprises the nucleic acid molecule according to [1] or [2], or the vector or the expression cassette according to [8].
[0040] [13] Seed according to [12], which has been technically treated, whereby the technical treatment is selected from the group consisting of:

[0041] (a) Polishing,

[0042] (b) Dressing, preferably pelleting,

[0043] (c) Incrustation, and

[0044] (d) Colouring.
[0045] [14] Oligonucleotide or a pair of oligonucleotides of at least 15, 16, 17, 18, 19, or 20, preferably at least 21, 22, 23, 24, or 25, particularly preferably at least 30, 35, 40, 45, or 50, and particularly preferably at least 100, 200, 300, or 500 nucleotides in length, wherein the oligonucleotide or the pair of oligonucleotides
   [0046] (i) specifically hybridizes to a nucleotide sequence as defined in any one of [3] to [6], but not to a nucleotide sequence as defined in [1] or [2];
   [0047] (ii) specifically hybridizes to a nucleotide sequence as defined in [1] or [2], but not to the nucleotide sequence as defined in any one of [3] to [6];
   [0048] (iii) specifically hybridizes to a region in the Beta vulgaris genome that, in Beta vulgaris, cosegregates with the nucleic acid molecule according to any one of [3] to [6] and/or with the nucleic acid molecule according to any one of [3] to [6] together with the Rz2 gene; and/or
   [0049] (iv) specifically hybridizes to a region in the Beta vulgaris genome that, in Beta vulgaris, cosegregates with the nucleic acid molecule according to [1] or [2] and/or with the nucleic acid molecule according to [1] or [2] together with the Rz2 gene.
[0050] [15] The oligonucleotide or pair of oligonucleotides according to [14], wherein the oligonucleotide or pair of oligonucleotides is selected from the group consisting of SEQ ID NOs: 24 to 40.
[0051] [16] A method for conferring, restoring or increasing the resistance to BNYVV in a plant of the species Beta vulgaris comprising the Rz2 resistance gene mediating BNYVV resistance endogenously or transgenically, including the following steps:
   [0052] (i) integration or introgression of the nucleic acid molecule according to [1] or [2] by means of homology-directed repair or homologous recombination—preferably, promoted by site-directed nuclease—into the genome of at least one cell of a plant of the species Beta vulgaris, and optional regeneration of a plant from the plant cell; or
   [0053] (ii) increasing the expression of the nucleic acid molecule according to [1] or [2] in the plant—preferably, via modification of the native promoter or via fusion of the nucleic acid molecule with a heterologous promoter that exhibits a higher activity in comparison to the native promoter—in particular, after BNYVV infection; or
   [0054] (iii) increase in the activity and/or stability of the functional allele of the polypeptide which is encoded by the nucleic acid molecule according to [1] or [2] as defined in [7] via modification of the nucleotide sequence according to [1] or [2];
   [0055] (iv) transformation of a plant cell with the nucleic acid molecule according to [1] or [2], or the vector or the expression cassette which comprises the nucleic acid molecule according to [1] or [2] as defined in [8,] and optionally regeneration of a transgenic plant from the transformed plant cell; or
   [0056] (v) mutagenesis of a plant or plant cells comprising the nucleic acid molecule according to any one of [3] to [6], and screening/selecting for plants or plant cells, respectively, in which a functional allele of the polypeptide encoded by the nucleic acid molecule according to [1] or [2] has been restored and/or the expression of the non-functional polypeptide has been abolished.
[0057] [17] A method for producing a BNYVV-resistant plant comprising the nucleic acid molecule according to [1] or [2] as defined in [10], including the following steps:
   [0058] (I) provision of a plant of the genus Beta or a plant cell of the genus Beta comprising the Rz2 resistance gene mediating BNYVV resistance endogenously or transgenically; and
   [0059] (IIa) transformation of the plant cell of (I) with the nucleic acid molecule according to [1] or [2], or the vector or the expression cassette which comprises the nucleic acid molecule according to [1] or [2] as defined in [8]; and
   [0060] (IIb) regeneration of a transgenic plant from the transformed plant cell; or
   [0061] (IIIa) introduction of a site-directed nuclease or nickase and optionally a repair matrix, or a site-directed base editor into the plant cell, wherein the site-directed nuclease is able to generate at least one single-strand break of the DNA or at least one double-strand break of the DNA at a predetermined location in the genome of the cell and the repair matrix comprises the nucleic acid molecule according to [1] or [2], or wherein the site-directed base editor is able to generate at least one single-strand break of the DNA at a predetermined location in the genome of the cell and to convert at least one nucleobase; and
   [0062] (IIIb) optionally, cultivation of the cell from (IIIa) under conditions that allow modification of the genome at the predetermined location, selected from
   [0063] a) a replacement of at least one nucleotide;
   [0064] b) a deletion of at least one nucleotide;
   [0065] c) an insertion of at least one nucleotide;
   [0066] d) any combination of a)-c),
   [0067] optionally by homology-directed repair or homologous recombination,
   [0068] wherein the nucleic acid molecule is integrated into the genome of the plant; and
   [0069] (IIIc) regeneration of a plant from the cell modified in (IIIb); or
   [0070] (IVa) crossing of the plant of (I) with the plant according to any one of [10] to [12]; and
   [0071] (IVb) identifying and selecting a plant comprising the Rz2 resistance gene mediating BNYVV endogenously or transgenically and the nucleic acid molecule according to [1] or [2] endogenously or transgenically, wherein the Rz2 resistance gene and/or the nucleic acid molecule according to [1] or [2] is present homozygously in the genome of the plant.
[0072] [18] The method according to [17], characterized in that the predetermined location is in the nucleic acid molecule according to any one of [3] to [6] or a position which is at most 10.000 base pairs upstream or downstream away from the nucleic acid molecule according to any one of [3] to [6].
[0073] [19] A method for identifying a plant of the species Beta vulgaris, a portion thereof or a seed thereof comprising the nucleic acid molecule according to [1] or [2], wherein the plant is capable of exhibiting resistance against BNYVV mediated by Rz2, if present in the genome of the plant, comprising:
   [0074] (i) detection of the presence and/or expression of the nucleic acid molecule according to [1] or [2], or the presence of the polypeptide which is encoded by the nucleic acid molecule according to [1] or [2] as defined in [7] in the plant, the portion thereof or the seed thereof; and/or
   [0075] (ii) detection of at least one marker locus in the nucleotide sequence of the nucleic acid molecule according to [1] or [2] or in one or more cosegregating regions thereof; and
   [0076] (iii) identification and optionally selection of the plant of the species Beta vulgaris, the portion thereof or the seed thereof comprising the nucleic acid molecule according to [1] or [2], which is capable of exhibiting resistance against BNYVV mediated by Rz2, if present in the genome of the plant, based on the detection of (i) and/or (ii).
[0077] [20] A method for identifying a plant of the species Beta vulgaris, a portion thereof or a seed thereof comprising the nucleic acid molecule according to any one of [3] to [6], comprising:
   [0078] (i) detection of the presence and/or expression of the nucleic acid molecule according to any one of [3] to [6], or the presence of the polypeptide which is encoded by the nucleic acid molecule according to any one of [3] to [6] as defined in [7] in the plant, the portion thereof or the seed thereof; and/or
   [0079] (ii) detection of at least one marker locus in the nucleotide sequence of the nucleic acid molecule according to any one of [3] to [6] or in one or more cosegregating regions thereof; and
   [0080] (iii) identification and optionally selection of the plant of the species Beta vulgaris, the portion thereof or the seed thereof comprising the nucleic acid molecule according to any one of [3] to [6], based on the detection of (i) and/or (ii).
[0081] [21] The method according to [19] or [20], wherein the detection of the at least one marker locus in the nucleotide sequence of the nucleic acid molecule according to [1] or [2] or in the nucleotide sequence of the nucleic acid molecule according to any one of [3] to [6] comprises the use of the oligonucleotide or the pair of oligonucleotides according to claim 14 or 15, and wherein the one or more cosegregating regions are genomic intervals in Beta vulgaris on chromosome 3 which comprise and are flanked by marker loci detectable by means of
   [0082] (i) the markers s3e5985s01 (SEQ ID No. 33) and s3p4348s01 (SEQ ID No. 27), and/or
   [0083] (ii) the markers s3p4351s01 (SEQ ID No. 29) and s3e2247xxx (SEQ ID No. 40), preferably by means of
   [0084] (i) the markers sxh1002s02 (SEQ ID No. 34) and s3p4348s01 (SEQ ID No. 27), and/or
   [0085] (ii) the markers s3p4351s01 (SEQ ID No. 29) and sxn1017s02 (SEQ ID No. 39), more preferably means of
   [0086] (i) the markers sxh2499s01 (SEQ ID No. 35) and s3p4348s01 (SEQ ID No. 27), and/or
   [0087] (ii) the markers sxi0698s01 (SEQ ID No. 36) and s3p4348s01 (SEQ ID No. 27), and/or
   [0088] (iii) the markers s3p4351s01 (SEQ ID No. 29) and sxe7357s01 (SEQ ID No. 38), and/or
   [0089] (iv) the markers s3p4351s01 (SEQ ID No. 29) and sxh8485s01 (SEQ ID No. 37), and/or
   [0090] (v) the markers s3p4351s01 (SEQ ID No. 29) and s3e5853s01 (SEQ ID No. 26), and/or
   [0091] (vi) the markers s3p4351s01 (SEQ ID No. 29) and s3e5800s01 (SEQ ID No. 32), and/or
   [0092] (vii) the markers s3p4351s01 (SEQ ID No. 29) and s3e4913xxx (SEQ ID No. 31), and/or
   [0093] (viii) the markers s3p4351s01 (SEQ ID No. 29) and s3e5782s01 (SEQ ID No. 30).
[0094] [22] The method according to [19] or [21] additionally comprising
   [0095] (A) detection of the presence and/or expression of the Rz2 gene or the presence of the polypeptide encoded by the Rz2 gene in the plant, the portion thereof or the seed thereof; and/or
   [0096] (B) detection of at least one marker locus in the Rz2 gene or in one or more regions cosegregating with the Rz2 gene, preferably cosegregating with a chromosomal interval comprising the nucleic acid molecule according to [1] or [2] and the Rz2 gene;
   [0097] wherein in (iii) of [19] the identified and optionally selected plant, the portion thereof or the seed thereof comprises the nucleic acid molecule according to [1] or [2], and the Rz2 gene, based on the detection of (i) and/or (ii) of [19] and detection of (B).
[0098] [23] The method according to [22], wherein the at least one marker locus in the nucleotide sequence of the Rz2 gene is detectable by means of the marker s3e5853s01 (SEQ ID No. 26) and wherein the one or more regions cosegregating with the Rz2 gene are genomic intervals in Beta vulgaris on chromosome 3 which comprise and are flanked by marker loci detectable by means of
   [0099] (i) the markers s3p4351s01 (SEQ ID No. 29) and s3e5853s01 (SEQ ID No. 26), and/or
   [0100] (ii) the markers s3e5853s01 (SEQ ID No. 26) and s3e2247xxx (SEQ ID No. 40), preferably by means of
   [0101] (i) the markers s3p4351s01 (SEQ ID No. 29) and s3e5853s01 (SEQ ID No. 26), and/or
   [0102] (ii) the markers s3e5853s01 (SEQ ID No. 26) and sxn1017s02 (SEQ ID No. 39), more preferably means of
   [0103] (i) the markers s3p4351s01 (SEQ ID No. 29) and s3e5853s01 (SEQ ID No. 26), and/or
   [0104] (ii) the markers s3e5853s01 (SEQ ID No. 33) and sxe7357s01 (SEQ ID No. 38), and/or
   [0105] (iii) the markers s3e5853s01 (SEQ ID No. 26) and sxh8485s01 (SEQ ID No. 37).
[0106] [24] The method according to [22], wherein the in one or more regions cosegregating with the chromosomal interval comprising the nucleic acid molecule according to [1] or [2] and the Rz2 gene are genomic intervals in Beta vulgaris on chromosome 3 which comprise and are flanked by marker loci detectable by means of
   [0107] (i) the markers s3e5985s01 (SEQ ID No. 33) and s3p4348s01 (SEQ ID No. 27), and/or
   [0108] (ii) the markers s3e5853s01 (SEQ ID No. 26) and s3e2247xxx (SEQ ID No. 40), preferably by means of
   [0109] (i) the markers sxh1002s02 (SEQ ID No. 34) and s3p4348s01 (SEQ ID No. 27), and/or
   [0110] (ii) the markers s3e5853s01 (SEQ ID No. 26) and sxn1017s02 (SEQ ID No. 39), more preferably means of
   [0111] (i) the markers sxh2499s01 (SEQ ID No. 35) and s3p4348s01 (SEQ ID No. 27), and/or
   [0112] (ii) the markers sxi0698s01 (SEQ ID No. 36) and s3p4348s01 (SEQ ID No. 27), and/or
   [0113] (iii) the markers s3e5853s01 (SEQ ID No. 26) and sxe7357s01 (SEQ ID No. 38), and/or
   [0114] (iv) the markers s3e5853s01 (SEQ ID No. 26) and sxh8485s01 (SEQ ID No. 37).
[0115] [25] Use of the oligonucleotide or pair of oligonucleotides according to [14] or [15] for identifying and/or selecting a plant of the species Beta vulgaris capable of exhibiting resistance to BNYVV mediated by Rz2, if present in the genome of the plant, or which capability of exhibiting resistance to BNYVV mediated by Rz2, if present in the genome of the plant, is impaired.
[0116] [26] A method for cultivation of plants of the species Beta vulgaris, including
   [0117] (i) planting seedlings of the plant according to [10] or [11] or sowing seeds according to [12] or [13], and
   [0118] (ii) grown the plants from the seedlings or seeds, and
   [0119] (iii) optionally, harvest root beets from the grown plants;
   [0120] wherein the method counteracts an infestation of the cultivated plants with BNYVV.
[0121] [27] Use of the nucleic acid molecule according to [1] or [2] or the nucleic acid molecule according to any one of [3] to [6], the polypeptide according to [7], the vector or expression cassette according to [8], and/or the cell according to [9] for the identification of nucleic acid molecules which are involved in Rz2 mediated resistance to BNYVV.

[0122] [28] Use of the nucleic acid molecule according to [1] or [2] or the nucleic acid molecule according to any one of [3] to [6], the polypeptide according to [7] and/or the vector or expression cassette according to [8] for the production of BNYVV-resistant plants, preferably of plants of the species Beta vulgaris, more preferably of plants of Beta vulgaris ssp. vulgaris var. vulgaris, Beta vulgaris ssp. vulgaris var. conditiva, oder Beta vulgaris ssp. vulgaris var. crassa/alba.
[0123] [29] The nucleic acid molecule according to [1] to [6], the plant or a portion thereof according to [11], the oligonucleotide or a pair of oligonucleotides according to [14] or [15], the methods according to any one of [16] to [19] and [22] to [24], and the use according to [25] and [27], wherein the Rz2 gene or the Rz2 resistance gene is a nucleic acid molecule comprises a nucleotide sequence selected from
   [0124] a) a nucleotide sequence that encodes a polypeptide with an amino acid sequence according to SEQ ID NO. 22 or SEQ ID NO. 23,
   [0125] b) a nucleotide sequence comprising the coding sequence of the DNA sequence according to SEQ ID NO. 21,
   [0126] c) a nucleotide sequence that encodes a polypeptide derived by substitution, deletion and/or addition of an amino acid of the amino acid sequence encoded by the nucleotide sequence according to a) or b), from a polypeptide encoded by the nucleotide sequence according to a) or b),
   [0127] d) a nucleotide sequence that encodes a polypeptide having an amino acid sequence, which is at least 80% identical to an amino acid sequence encoded by the nucleotide sequence according to a) or b), or
   [0128] e) a nucleotide sequence which encodes at least the amino acid positions 168-227 of SEQ ID NO. 22 and at least the amino acid positions 591-613 of SEQ ID NO. 22 and at least the amino acid positions 1013-1072 of SEQ ID NO. 22 or which encodes at least the amino acid positions 182-241 of SEQ ID NO. 23, at least the amino acid positions 605-627 of SEQ ID NO. 23 and at least the amino acid positions 1027-1086 of SEQ ID NO. 23.
[0129] [30] The method according to [19] wherein the detection according to step (i) and/or step (ii) is based on PCR, preferably kompetitive allele specific PCR (KASP) wherein optionally labeled primers are applied.
[0130] [31] The method according to [20] wherein the detection according to step (i) and/or step (ii) is based on PCR, preferably kompetitive allele specific PCR (KASP) wherein optionally labeled primers are applied.
[0131] [32] The method according to [26] wherein the planting according to (i) is done by a mechanical device which is preferably selected from the group consisting of: sower, planter and seeder.
[0132] [33] The method according to [26] or [32] wherein the harvest according to (iii) is done by a mechanical device which may be a harvester preferably a sugar beet harvester.
[0133] [34] The method according to [26], [32] or [33] wherein the leaves of the plant are removed mechanically during the harvest according to (iii) wherein the mechanical removal is preferably done by a harvester as defined in [33].
[0134] [35] The method according to [26], [32], [33] or [34] comprising an additional step (iv) extracting sugar, preferably sucrose, from the harvested root beets.
[0135] [36] The use according to [25] or the oligonucleotide or a pair of oligonucleotides according to [14] or [15] wherein the oligonucleotide or the pair of oligonucleotides is labeled preferably fluorescently labeled, more preferably fluorescently labeled by FAM or HEX.
[0136] [37] A cell extract of the cell according to [9], a plant or a portion thereof according to [10] or [11].
[0137] [38] The cell extract according to [37] comprising the nucleic acid molecule according to [1].
[0138] [39] The cell extract according to [37] or [38] wherein the cell extract comprises sucrose.
[0139] [40] The cell extract according to [37], [38] or [39] wherein the sucrose concentration is at least 10%, preferably at least 15% more preferably at least 20% and most preferably 10%-20% wherein the concentration is given as mass concentration [g/dl].
[0140] [41] The method according to [19] or [20] wherein the identified plant or its seed are used in a method according to [26], [32], [33] or [34].
[0141] [42] The polypeptide according to [7] wherein the protein comprises one or two or three or four or five amino acid substitutions within the sequence of SEQ ID No. 45.
[0142] [43] The polypeptide according to [7] wherein the polypeptide is an artificial compound which does not occur in nature.
[0143] [44] A method for the production of molecular markers for the identification of the nucleic acid molecule according to [1] comprising the following steps:
   [0144] a) Providing a sequence alignment between SEQ ID No. 54 and SEQ ID No. 55
   [0145] b) Identifying at least one polymorphism between SEQ ID No. 54 and SEQ ID No. 55
   [0146] c) Developing one more molecular markers which are suitable to detect the polymorphism identified under b)
[0147] [45] The method according to [44] wherein the at least one polymorphism is a single nucleotide polymorphism.
[0148] [46] Use of a molecular marker on a nucleotide sequence according to SEQ ID No. 54 for the identification of the nucleic acid molecule according to [1] or for the identification of a plant comprising the nucleic acid molecule according to [1].

[0149] First, some of the terms used in this application are explained in detail in the following:

[0150] In conjunction with the specification of a length of a nucleotide sequence, the term, “approximately,” means a deviation by +/−200 base pairs—preferably, by +/−100 base pairs, and, particularly preferably, by +/−50 base pairs.

[0151] A “plant of the genus Beta” belongs to the amaranth family (Amaranthaceae). Numbering among these plants are plants of the species Beta macrocarpa, Beta vulgaris, Beta lomatogona, Beta macrorhiza, Beta corolliflora, Beta trigyna, and Beta nana. A plant of the species Beta vulgaris is, in particular, a plant of the subspecies Beta vulgaris subsp. vulgaris. For example, numbering among these are Beta vulgaris subsp. vulgaris var. altissima (sugar beet in a narrower sense), Beta vulgaris ssp. vulgaris var. vulgaris (chard), Beta vulgaris ssp. vulgaris var. conditiva (beetroot/red beet), Beta vulgaris ssp. vulgaris var. crassa/alba (fodder beet).

[0152] A “functional fragment” of a nucleotide sequence means a segment of a nucleotide sequence which has a functionality identical or comparable to that of the complete nucleotide sequence from which the functional fragment originates. As such, the functional fragment may possess a nucleotide sequence which is identical or homologous to the total nucleotide sequence over a length of at least 50%, 55%, 60%, 65%, 70%, 75%, 80%, 85%, 90%, 92%, 94% 96%, 97%, 98%, or 99%. This also explicitly encompasses the range of 90-100%. Furthermore, a “functional fragment” of a nucleotide sequence may also mean a segment of a nucleotide sequence which modifies the functionality of the entire nucleotide sequence, e.g., in the course of post-transcriptional or transcriptional gene silencing. As such, the functional fragment of a nucleotide sequence may comprise at least 14, 15, 16, 17, 18, 19, 20, 21, 22, 23, 24, or 25—preferably, at least 30, 35, 40, 45, 50, 60, 70, 80, 90, 100, 120, or 140, and, particularly preferably, at least 160, 180, 200, 250, 300, 350, 400, 450, 500, 600, 700, 800, 900, or 1,000—successive nucleotides of the total nucleotide sequence. This also explicitly encompasses the range of 21 to 50 nucleotides.

[0153] A “functional part” of a protein means a segment of a protein, or a section of the amino acid sequence, that encodes the protein, wherein the segment may exert functionality identical or comparable to that of the entire protein in a plant cell. Over a length of at least 50%, 55%, 60%, 65%, 70%, 75%, 80%, 85%, 90%, 92%, 94% 96%, 97%, 98%, or 99%, a functional part of a protein has an amino acid sequence that is identical or, with consideration of conservative and semi-conservative amino acid exchanges, similar to the protein from which the functional part originates.

[0154] The term, “heterologous,” means that the introduced polynucleotide originates from a cell or an organism with a different genetic background, of the same species or a different species, or is homologous to the prokaryotic or eukaryotic host cell, but is then located in a different genetic environment and thus differs from a corresponding polynucleotide that is possibly naturally present. A heterologous polynucleotide may be present in addition to a corresponding endogenous gene.

[0155] In the sense of the invention, what is understood by a “homolog” is a protein of the same phylogenetic origin; what is understood by an “analog” is a protein which exerts the same function, but has a different phylogenetic origin; what is understood by an “ortholog” is a protein from a different species that exerts the same function; and what is understood by a “paralog” is a protein that has appeared within a species due to duplication, wherein this copy either retains the same protein function, alters its expression template, but not the function, changes its protein function, or divides up the original gene function between both copies.

[0156] What is to be understood by “hybridizing” or “hybridization” is a process in which a single-stranded nucleic acid molecule binds to a nucleic acid strand that is complementary to the greatest possible extent, i.e., forms base pairs with this. Standard methods for hybridization are described in, for example, Sambrook et al., Molecular Cloning: A Laboratory Manual, 3rd ed., Cold Spring Harbor Laboratory Press, Cold Spring Harbor, N.Y., 2001. What is preferably understood by this is that at least 60%—more preferably, at least 65%, 70%, 75%, 80%, or 85%, and, particularly preferably, 90%, 91%, 92%, 93%, 94%, 95%, 96%, 97%, 98%, or 99%—of the bases of the nucleic acid molecule form a base pairing with the nucleic acid strand that is complementary to the greatest possible extent. The possibility of such an annealing depends upon the stringency of the hybridization conditions. The term, “stringency,” relates to the hybridization conditions. High stringency is present when a base pairing is made more difficult; low stringency is present if a base pairing is made easier. For example, the stringency of the hybridization conditions depends upon the salt concentration or ionic strength and the temperature. In general, the stringency may be increased by increasing the temperature and/or decreasing the salt content. What are to be understood by “stringent hybridization conditions” are those conditions given which a hybridization predominantly occurs only between homologous nucleic acid molecules. The term, “hybridization conditions,” thereby relates not only to the conditions prevailing in the actual addition of the nucleic acids, but also to the conditions prevailing in the following washing steps. For example, stringent hybridization conditions are conditions under which, predominantly, only those nucleic acid molecules hybridize that have at least 70%—preferably, at least 75%, at least 80%, at least 85%, at least 90%, or at least 95%—sequence identity. Stringent hybridization conditions are, for example: hybridization in 4×SSC at 65° C., and subsequent repeated washing in 0.1×SSC at 65° C. for approximately 1 hour in total. A hybridization preferably occurs under stringent conditions.

[0157] In relation to a nucleic acid in the form of a double-stranded DNA, “complementary” nucleotide sequence means that the second DNA strand complementary to the first DNA strand has the nucleotides that correspond to the bases of the first strand, in accordance with the base pairing rules. A complementary sequence is, preferably, entirely complementary to the counter-sequence, and thus preferably has the same length.

[0158] What is understood by an “isolated nucleic acid molecule” is a nucleic acid molecule extracted from its natural or original environment. The term also encompasses a synthetically-produced nucleic acid molecule. What is understood by an “isolated polypeptide” is a polypeptide extracted from its natural or original environment. The term also encompasses a synthetically-produced polypeptide.

[0159] A “molecular marker” is a nucleic acid that is polymorphic in a plant population and is used as a reference or orientation point. A marker for the detection of a recombination event should be suitable for monitoring differences or polymorphisms within a plant population. Such a marker is thus able to detect and differentiate between various allelic states (alleles). The term, “molecular marker,” also relates to nucleotide sequences which are complementary or at least largely complementary or homologous to genomic sequences—for example, nucleic acids which are used as probes or primers. These differences at the DNA level are to be found as markers and are, for example, polynucleotide sequence differences, e.g., SSR's (simple sequence repeats), RFLP's (restriction fragment length polymorphisms), FLP's (fragment length polymorphisms) or SNP's (single nucleotide polymorphisms). The markers may be derived from genomic or expressed nucleic acids, e.g., spliced RNA, cDNA, or EST's, and may also relate to nucleic acids that are used as probes or primer pairs and as such are suitable for amplifying a sequence fragment using PCR-based methods. Markers that describe genetic polymorphisms (between parts of a population) may be detected using well-established methods from the prior art (An Introduction to Genetic Analysis, 7th edition, Griffiths, Miller, Suzuki, et al., 2000). For example, among these are DNA sequencing, PCR-based, sequence-specific amplification, verification of RFLP's, verification of polynucleotide polymorphisms by means of allele-specific hybridization (ASH), detection of amplified variable sequences of the plant genome, detection of a 3SR (self-sustained sequence replication), detection of SSR's, SNP's, RFLP's, or AFLP's (amplified fragment length polymorphisms). Furthermore, the methods for detection of EST's (expressed sequence tags) and SSR markers derived from EST sequences and RAPD (randomly amplified polymorphic DNA) are also known. Depending upon the context, the term, “marker,” in the description may also mean a specific chromosome position in the genome of a species where a specific marker (SNP, for example) may be found.

[0160] Markers also include synthetic oligonucleotides that may be connected with one or more detection molecules, wherein the detection molecules may be used for a detection reaction or the generation of a signal within the scope of a verification method. Synthetic oligonucleotides also include labeled primers. Labeled primer include fluorescently labeled primers. Fluorescently labeled primers may be labeled by FAM or HEX. Synthetic oligonucleotides and labeled primers may by used within a polymerase chain reaction (PCR) as well as within a Kompetitive allele specific PCR. Synthetic oligonucleotides and labeled primers are artificial compounds, do not occur in nature, and cannot be isolated from nature. The production of such compounds is explained further below.

[0161] A “promoter” is a non-translated, regulatory DNA sequence, typically upstream of a coding region, which contains the binding point for the RNA polymerase and initiates the transcription of the DNA. A promoter additionally contains other elements that act as a regulator gene for gene expression (for example, cis-regulatory elements). A “core or minimal promoter” is a promoter that has the basic elements which are needed for transcription initiation (for example, TATA box and/or initiator).

[0162] A “pathogen” means an organism that, in interactions with a plant, leads to disease symptoms in one or more organs in the plant. For example, animal, fungal, bacterial, or viral organisms or oomycetes number among these pathogens.

[0163] What is to be understood by a “pathogenic infection” is the earliest point in time at which a pathogen interacts with a plant host tissue. In this sense, “infestation” means the occurrence of contact between pathogen and host. For example, the viral pathogen BNYVV is transmitted by the soil-borne fungus Polymyxa betae. Polymyxa forms spores which can survive in the soil for decades. The virus also survives in these spores. If these permanent spores lead to zoospores, the virus can germinate via these into cells of the plant host tissue and interact with the host (Esser (2000) Kryptogamen 1: Cyanobakterien Algen Pilze Flechten Praktikum and Lehrbuch. Springer-Verlag, Berlin, Heidelberg, 3rd edition).

[0164] Plant “organs” means, for example, leaves, shoot, stem, roots, hypocotyl, vegetative buds, meristems, embryos, anthers, ovula, seeds, or fruits. “Plant parts” include, but are not limited to, the shoot or the stalk, leaves, blossoms, inflorescence, roots, fruits, and seeds, as well as the pollen. The term, “plant parts,” also means an association of multiple organs, e.g., a blossom or a seed, or a part of an organ, e.g., a cross-section through the plant shoot. Plant “tissues” are, for example, callus tissue, storage tissue, meristematic tissue, leaf tissue, shoot tissue, root tissue, plant tumor tissue, or reproductive tissue, as well as the cambium, parenchyma, vascular tissue, sclerenchyma, and epidermis. However, the tissue is not limited to this listing. For example, what are to be understood by plant “cells” are, for example, isolated cells having a cell wall or aggregates thereof, or protoplasts.

[0165] The level of the resistance by way of example to BNYVV can be defined qualitatively in plants of the Beta genus by determination of “rating scores” (rating score schemes for plants of the Beta genus are known from the prior art, for example for sugar beet Mechelke (1997).

[0166] In conjunction with the present invention, the term, “regulatory sequence,” relates to a nucleotide sequence which influences the specificity and/or the expression strength, e.g., in that the regulatory sequence confers a defined tissue specificity. Such a regulatory sequence may be located upstream of the transcription initiation point of a minimal promoter, but also downstream thereof, e.g., in a transcribed, but not translated, leader sequence or within an intron.

[0167] The term, “resistance,” is to be understood broadly and covers the range of the protection from a retardation up to a complete blocking of the development of the disease. One example of an important pathogen is the Beet necrotic yellow vein virus (BNYVV). A resistant plant cell of the invention or resistant plant of the invention preferably achieves a resistance to BNYVV. A resistance to a pathogen is to be equated to a resistance to the disease which this pathogen causes; for example, a resistance to BNYVV is also a resistance to “root madness” (Rhizomania).

[0168] The “Rz2” resistance gene, which was identified and described in international patent application WO 2014/202044 A1 originates from the Beta maritima accession WB42 and is known to provide resistance to rhizomania when expressed in several varieties of sugar beet. Furthermore, it is known that Rz3 from the Beta maritima accession WB41 has been identified, which is most probably the same or a very similar allelic variant of Rz2. Thus, the Rz2 and Rz3 genes and respective proteins are substantially identical and the designation “Rz2” and “Rz3” can be used interchangeably.

[0169] “Remorins” are a family of plant-specific proteins containing a variable N-terminal region and conserved C-terminal domain and play a role in various biotic and abiotic stresses, including host-microbe interactions. The present invention distinguishes between a remorin gene, which encodes a functional remorin protein, i.e. a remorin protein which is involved in establishing Rz2 mediated BNYVV resistance in a plant in which the protein is expressed and a remorin gene which encodes a non-functional remorin protein, i.e. a remorin protein which interferes with Rz2 mediated BNYVV resistance in a plant in which the protein is expressed. In this context, the term “involved in” includes increasing the resistance as well as being essential for establishing the resistance against BNYVV in a plant additionally comprising the Rz2 resistance gene, in particular a high level of resistance against BNYVV. The term “non-functional” is used in terms of the inability to confer resistance in combination with the Rz2 gene.

[0170] Accordingly, the terms “functional form”, “functional (remorin) protein”, “functional (remorin) polypeptide”, “functional (remorin) variant”, “functional (remorin) allele”, “functional (remorin) gene”, and “functional nucleic acid molecule” of the present invention are used interchangeable in the present invention as well as the terms “non-functional form”, “non-functional (remorin) protein”, “non-functional (remorin) polypeptide”, “non-functional (remorin) variant”, “non-functional (remorin) allele”, “non-functional (remorin) gene, and “non-functional nucleic acid molecule” of the present invention.

[0171] “Transgenic plant” relates to a plant into whose genome is integrated at least one polynucleotide. It may thereby be a heterologous polynucleotide. The polynucleotide is, preferably, stably integrated, which means that the integrated polynucleotide is stably preserved in the plant, is expressed, and also may be stably passed on to the descendants. The stable introduction of a polynucleotide into the genome of a plant also includes the integration into the genome of a plant of the preceding parental generation, wherein the polynucleotide may be stably passed on further. The term, “heterologous,” means that the introduced polynucleotide originates from a cell or an organism with a different genetic background, of the same species or a different species, or is homologous to the prokaryotic or eukaryotic host cell, for example, but then is located in a different genetic environment and thus differs from a corresponding polynucleotide that is possibly naturally present. A heterologous polynucleotide may be present in addition to a corresponding endogenous gene.

[0172] “Raw material for industrial sugar production” means plant material which can be fed into a sugar production facility which is specialized in the extraction of sugar from sugar beets. Such raw material is typically the beet body (taproot) of the harvested sugar beet. To ensure the conformity with the extraction process the beet body needs to have sufficient mass, volume and a conical shape so that the raw material can be mechanically cut into shreds (beet strips). These beet strips maximize the surface area for sugar extraction and should have a low content of Sodium, Potassium and Nitrogen to allow an efficient extraction. After the extraction remaining beet pulp is pressed, dried and used as animal feed.

[0173] The “sucrose concentration” is expressed as percentage of the fresh weight of the root.

[0174] “Monogerm” means that a seed grows into exactly one plant whereas a polygerm or multigerm seed (also called “seed ball”) grows into several plants.

[0175] “Bolting” is the production of a flowering stem (or stems) on a sugar beet in a natural attempt to produce seeds and reproduce. Bolting is triggered in sugar beet due to vernalization, i.e. a chilling stress which might occur e.g. during overwintering. However, commercially grown sugar beets are harvested before bolting as the bolting process and subsequent seed setting reduces the sucrose content in the beet body.

[0176] “Kompetitive allele specific PCR” or “KASP” means a homogenous, fluorescence-based genotyping variant of polymerase chain reaction. It is based on allele-specific oligo extension and fluorescence resonance energy transfer for signal generation. This chemical reaction may be used for the detection of specific nucleic acid sequences in genomic DNA. Usually, fluorescently labeled primer are used for the PCR. FAM and HEX may be used as fluorescent tags.

[0177] Designs and embodiments of the present invention are described by way of example with reference to the pending sequences and figures.

[0178] FIG. 1: Model depicting a possible mode of interaction between the TGB1 protein of Beet necrotic yellow vein virus (BNYVV), the Rz2 NBS-LRR receptor protein and (A) the functional variant of the remorin protein or (B) the non-functional variant of the remorin protein. In variant (A), the TGB1 protein binds to and modifies the functional remorin protein, which can be detected by the Rz2 NBS-LRR receptor protein of the resistance allele and thus, a resistance reaction is initiated. In variant (B), the Rz2 NBS-LRR receptor protein cannot detect the non-functional remorin protein modified by TGB1 and thus, no resistance reaction is initiated.

[0179] FIG. 2: Sequence alignment between the coding DNA (cDNA) sequence of the remorin gene encoding a non-functional remorin protein, i.e. a remorin protein which interferes with Rz2 mediated BNYVV resistance in a plant in which the protein is expressed (haplotype 1, Hap1-ORF), and the cDNA sequences of 4 haplotypes of the remorin gene encoding functional remorin proteins, i.e. remorin proteins which are involved in establishing Rz2 mediated BNYVV resistance in a plant in which the proteins are expressed (Hap2-ORF, Hap3-ORF, Hap4-ORF and Hap5-ORF). The polymorphisms are highlighted in gray.

[0180] FIG. 3: Protein sequence alignment between a non-functional remorin protein, i.e. a remorin protein which interferes with Rz2 mediated BNYVV resistance in a plant in which the protein is expressed (Hap1), and 4 functional remorin proteins, i.e. remorin proteins which are involved in establishing Rz2 mediated BNYVV resistance in a plant in which the proteins are expressed (Hap2, Hap3, Hap4 and Hap5). The polymorphisms are highlighted in gray.

[0181] FIG. 4: Schematic overview of a transient assay for comparing the cell death reaction after expression of the TGB1 gene derived from BNYVV in leaf tissue of sugar beet comprising the resistance allele of Rz2 and either additionally comprising the functional allele of remorin (REM (f)) or the non-functional allele of remorin (REM (n-f)). The detailed experiment is explained in Example 2.

[0182] FIG. 5: Schematic overview of a transient assay for comparing the cell death reaction after expression of the TGB1 gene derived from BNYVV either in combination with the non-functional allele of remorin (REM (n-f)), with the functional allele of remorin (REM (f)), or with an empty vector control in leaf tissue of sugar beet comprising the resistance allele of Rz2 and the functional allele of remorin (REM (f)). The detailed experiment is explained in Example 2.

[0183] FIG. 6: Schematic overview of a transient assay for comparing the cell death reaction after expression of the TGB1 gene derived from BNYVV and the resistance allele of Rz2 either in combination with the non-functional allele of remorin (REM (n-f)) or with the functional allele of remorin (REM (f)) in leaf tissue of sugar beet which does neither comprise the resistance allele of Rz2 nor the functional allele of remorin (REM (f)). The detailed experiment is explained in Example 2.

[0184] FIG. 7: Schematic view of chromosome 3 of Beta vulgaris indicating the positions of the remorin gene and the Rz2 gene as well as the positions of various markers. Remorin is positioned about 0.75 cM distal to the Rz2 gene on the long arm of chromosome 3. Left: marker positions distal to remorin and proximal to Rz2, which define flanking areas that can be used for marker assisted breeding (MAS); Right: markers binding in the remorin gene, in the Rz2 gene as well as in the region between both genes.

[0185] FIG. 8: Visual illustration of the marker-based analysis of 2730 plants of a dividing population with regard to the presence of different allele combinations of the Rz2 resistance gene and the remorin gene in the recombinants, wherein A indicates the presence of the remorin gene encoding a non-functional remorin protein and B indicates the presence of the remorin gene encoding a functional remorin protein. H designates the genotypes are heterozygous for the non-functional remorin allele.

[0186] FIG. 9 The drawing shows a leaf of Nicotiana benthamiana after infiltration with Agrobacterium tumefaciens. The white surrounded spots mark the infiltrated areas wherein each area has been infiltrated with a different vector combination. The vector combinations are being explained in detail in the corresponding example.

[0187] FIG. 10 Measurement of the luciferase activity in transformed leaf discs of sugar beet. Different constructs have been provided:
[0188] 1: empty vector; 2: Rz2_C48+empty vector; 3: BNYVV_TGB1+empty vector; 4: Rz2_C48+BNYVV_TGB1; 5: Rz2_C48 D491V (autoactivated variant); 6: p70S-165-176_D80N (autoactivated CC domain, positive control)

### DETAILED DESCRIPTION OF THE INVENTION

[0189] In order to reveal the mechanism behind the observed effect that in certain sugar beet varieties the Rz2 mediated resistance against Beet necrotic yellow vein virus (BNYVV) is weakened or even completely lost, although the resistance allele of Rz2 is present and to use the gained knowledge for improving breeding processes, extensive crossing experiments as well as molecular biological experiments have been performed including genetic fine mapping, identification, isolation, and characterization of a gene encoding for a protein which in its functional form is important or crucial for establishing Rz2 mediated BNYVV resistance in plants and which in its non-functional form leads to suppression of said resistance.

[0190] The identification of both allelic variants, i.e. the one encoding a functional protein and the other encoding a non-functional protein is of high relevance in the breeding of BNYVV-resistant varieties that are to be equipped with Rz2 resistance. On the one hand, it is important to be able to separate the non-functional allele from the Rz2 resistance allele in order to use sugar beet lines showing a reduced or lost Rz2 mediated BNYVV resistance but having otherwise good breeding and agronomic properties in the breeding of BNYVV-resistant sugar beet varieties. On the other hand, it is of particular interest to understand the mechanism behind the development of Rz2 mediated resistance against BNYVV in plants, i.e. to identify the functional allele in order to efficiently generate plants being resistant to BNYVV.

[0191] Accordingly, the present invention generally relates to a nucleic acid molecule encoding a polypeptide which is involved in Rz2 mediated resistance against BNYVV. In this context, the term “involved in” includes increasing the resistance as well as being essential for establishing the resistance against BNYVV, in particular a high level of resistance against BNYVV. Thus, the nucleic acid molecule of the present invention and the encoded polypeptide, respectively, modifies the Rz2 mediated resistance against BNYVV in a plant in which the polypeptide is expressed. Preferably, the nucleic acid molecule of the present invention increases the resistance to BNYVV or is essential for establishing the resistance against BNYVV in a plant in which the corresponding polynucleotide is expressed. For the sake of simplicity, this nucleic acid molecule is referred to as “functional form”, “functional variant”, “functional allele”, “functional gene”, or “functional nucleic acid molecule” of the present invention.

[0192] Preferably, the nucleic acid molecule of the present invention modifies the Rz2 mediated resistance against BNYVV in a plant belonging to the genus Beta, preferably to the species Beta vulgaris, more preferably to the subspecies Beta vulgaris subsp. vulgaris.

[0193] The present invention further relates to a nucleic acid molecule which specifically hybridizes to the nucleic acid molecule of the present invention and encodes a non-functional allele of the polypeptide, i.e. a non-functional variant, which interferes with the resistance against BNYVV mediated by the Rz2 resistance gene in a plant in which the polypeptide is expressed. For the sake of simplicity, this nucleic acid molecule is referred to as “non-functional form”, “non-functional variant”, “non-functional allele”, “non-functional gene”, or “non-functional nucleic acid molecule” of the present invention.

[0194] In particular, the non-functional nucleic acid molecule of the present invention is able to reduce or suppress Rz2 mediated resistance to BNYVV in a plant in which the corresponding polynucleotide is expressed. Preferably said plant belongs to the genus Beta, preferably to the species Beta vulgaris, more preferably to the subspecies Beta vulgaris subsp. vulgaris.

[0195] The Rz2 resistance gene, which was previously identified and described in international patent application WO 2014/202044 A1 originates from the Beta maritima accession WB42 and is known to provide resistance to rhizomania when expressed in several varieties of sugar beet. The corresponding nucleic acid sequence is disclosed in WO 2014/202044 A1 and incorporated herein by reference. Rz3 from the Beta maritima accession WB41 has been identified, which is probably an allelic version of Rz2. Thus, the Rz2 and Rz3 genes are substantially identical and it is prudent to expect, but without to be bound by theory, that the nucleic acid molecule of the present invention is also involved in or interferes with Rz3 mediated resistance to BNYVV.

[0196] The identification and genetic localization of the nucleic acid molecule of the present invention has been performed as described in detail in Example 1. Initially, the focus was on the identification and localization of the non-functional allele. By genetic mapping it has been shown that the non-functional allele is localized close by the Rz2 locus. However, this area still contained too many genes to name a specific candidate. A particular challenge was the close genetic coupling/linkage of the non-functional allele with the Rz2 resistance gene. If it was located on another chromosome or at a greater distance from the Rz2 gene, the effect would be visible in QTL mapping as a separate effect. When using common breeding processes it was thus not possible to explain why genotypes were susceptible to rhizomania despite the presence of the resistance allele of Rz2.

[0197] Parallel to genetic mapping, the patterns of molecular markers in multigenic breeding material were analyzed. The marker s3e5798s01 (see Table 5) showed the highest evidence for the positioning of the repressor effect. Analysis of the reference sequence for this region showed that the marker s3e5798s01 is located in an annotated gene model (g23238.t1). The gene contains a remorin domain (C-terminal region) and is expressed in the plasmalemma. Remorins, a family of plant-specific proteins containing a variable N-terminal region and conserved C-terminal domain, play a role in various biotic and abiotic stresses, including host-microbe interactions. However, until now, their function is not fully understood.

[0198] There are indications in the literature that remorins can play a role in the spread of viruses through plasmodesmata (PDs) and in particular that they can act as negative regulator of virus movement (Raffaele et al., Plant Cell (2009), 21(5), 1541-1555; Perraki et al., FEMS Letters (2014), 588(9), 1699-1705). In general, PDs provide cell-to-cell connections that enable the symplastic transport of molecules from 1 to 60 kD. Viruses can move through PDs to achieve a local spreading infection, and symplastic loading into the phloem to initiate systemic infection.

[0199] In more detail, Raffaele et al. 2009 reported that in potato remorin interferes with cell-to-cell movement of Potato Virus X and binds directly to the virus movement protein TGBp1 (Triple Gene Block 1 protein). In plants underaccumulating remorin, a significant increase in viral accumulation in the leaves of infected plants has been observed and the infection foci were significantly larger than in wild-type plants. Consistently, reduced virus accumulation and smaller infection foci were observed in plants overexpressing remorin. Thus, remorin seems to have an antagonist effect on virus propagation. In this context, Perraki et al. 2014 have shown that in potatoes a remorin gene limits the ability of Potato Virus X TGBp1 to increase the permeability of PDs.

[0200] Furthermore, a recently published work by Wetzel and Varrelmann (International Plant Immunity Symposium—1st IRTG 2172 PRoTECT Symposium June 14th and 15th 2018, Gottingen, Germany) suggests that the protein produced by the Rz2 gene, i.e. the Rz2 NBS-LRR receptor protein, may interact with the TGBp1 protein of BNYVV, the virus causing rhizomania. The missing link between the Rz2 NBS-LRR receptor protein and the TGBp1 protein of BNYVV might be the remorin identified in accordance with the present invention. From this a possible mode of action can be derived, which is shown in FIG. 1A. Thus, it is to be assumed—but without being bound by one theory—that the remorin gene of the present invention has a similar or even the same function in Beta vulgaris as described above, i.e. that it acts as negative regulator of BNYVV movement.

[0201] The non-functional allele of the remorin gene identified in accordance with the present invention seems to be a non-functional protein. One possible mode of action is presented in FIG. 1B, wherein the Rz2 NBS-LRR receptor protein of the resistance allele cannot detect the modification of this allele by the TGB1 protein of BNYVV. Therefore, no resistance reaction is initiated.

[0202] Further experiments performed in accordance with the present invention confirmed this hypothesis in that first results showed that the combination of the resistance allele of Rz2 with the non-functional allele of remorin leads to plants still being susceptible to rhizomania, while plants comprising the resistance allele of Rz2 and the functional allele of remorin show resistance; see Example 2.

[0203] The knowledge gained throughout identification and analysis of the non-functional remorin allele has been used afterwards to identify the functional remorin allele. In particular, a comparative analysis of genomic sequences of a sugar beet variety comprising the non-functional remorin allele and thereby showing no or reduced BNYVV-resistance despite the presence of the Rz2 gene with sequences of 80 additional sugar beet genotypes has been performed in order identify the sequence of the functional remorin gene.

[0204] A total of five different haplotypes (alleles) were found. The haplotype of the non-functional remorin gene (haplotype 1) can be distinguished from the other four haplotypes, i.e. the functional remorin genes, by three KASP markers (s3p4348s01 (SEQ ID NO: 27; non-functional allele: G), s3p4349s01 (SEQ ID NO: 28; non-functional allele: T), s3p4351s01 (SEQ ID NO: 29; non-functional allele: T); see Table 5. The coding sequence, i.e. the open reading frame (ORF) of the non-functional allele set forth in SEQ ID NO: 3 has five small nucleotide polymorphisms (SNPs) which distinguish the haplotype (Hap1) from the other four haplotypes (Hap2-5; SEQ ID NOs: 7, 11, 15 and 19) (FIG. 2). Accordingly, the coding sequence (CDS) of Hap1 has an A instead of a G at position 72, a G instead of a C at position 73, an A instead of a G at position 111, an A instead of a C at position 214, and an A instead of a G at position 556; see Table 1. The protein sequence of the non-functional allele set forth in SEQ ID NO: 4 differs clearly in three amino acids from the other four haplotypes (SEQ ID NOs: 8, 12, 16 and 20); see Table 2. As shown in FIG. 3, the translated non-functional polypeptide encoded by the non-functional remorin gene has Ala instead of Pro at position 25, Thr instead of Pro at position 72 and Ile instead of Val at position 186; see also Table 2.

TABLE 1
Identified SNPs in coding sequences (ORFs) of the non-functional
remorin allele (= haplotype 1, Hap1) in comparison with the ORFs of
the other four haplotypes, i.e. the functional remorin alleles. Positions
marked with * lead to amino acid exchanges, which could be the
reason for the non-functionality of the remorin.

| CDS | Hap1 | Hap2 | Hap3 | Hap4 | Hap5 |
|---|---|---|---|---|---|
| nucleotide | (SEQ ID | (SEQ ID | (SEQ ID | (SEQ ID | (SEQ ID |
| position | No: 3) | No: 7) | No: 11) | No: 15) | No: 19) |
| 72 | A | G | G | G | G |
| 73* | G | C | C | C | C |
| 111 | A | G | G | G | G |
| 214* | A | C | C | C | C |
| 556* | A | G | G | G | G |

TABLE 2
Identified amino acid substitutions in the predicted sequence of the
polypeptide of the non-functional remorin allele (= haplotype 1) in
comparison with the predicted sequence of the polypeptide of
other four haplotypes, i.e. the functional alleles of remorin.

| amino | Hap1 | Hap2 | Hap3 | Hap4 | Hap5 |
|---|---|---|---|---|---|
| acid | (SEQ ID | (SEQ ID | (SEQ ID | (SEQ ID | (SEQ ID |
| position | No: 4) | No: 8) | No: 12) | No: 16) | No: 20) |
| 25 | Ala | Pro | Pro | Pro | Pro |
| 72 | Thr | Pro | Pro | Pro | Pro |
| 186 | Ile | Val | Val | Val | Val |

[0205] For the sake of simplicity, a consensus sequence has been generated combining the cDNA sequences of haplotypes 2 to 5 (SEQ ID No. 44) and another one combining the amino acid sequences of haplotypes 2 to 5 (SEQ ID No. 45).

[0206] Accordingly, in one embodiment the present invention relates to a nucleic acid molecule encoding a polypeptide which is involved in Rz2 mediated resistance against BNYVV, wherein the amino acid sequence of the encoded polypeptide has a proline (P) at position 25 with reference to SEQ ID No. 45, a proline (P) at position 72 with reference to SEQ ID No. 45 or a valine (V) at position 186 with reference to SEQ ID No. 45. Of course, the amino acid sequence of the encoded polypeptide may have two of the mentioned amino acids at the indicated positions, i.e. a proline (P) at position 25 and a proline (P) at position 72 with reference to SEQ ID No. 45; a proline (P) at position 25 and a valine (V) at position 186 with reference to SEQ ID No. 45; or a proline (P) at position 72 and a valine (V) at position 186 with reference to SEQ ID No. 45; as well as three of the mentioned amino acids at the indicated positons, i.e. a proline (P) at position 25, a proline (P) at position 72 and a valine (V) at position 186 with reference to SEQ ID No. 45.

[0207] With reference to the coding DNA sequence of said nucleic acid molecule, the coding DNA sequence has a cytosine (c) at position 73 with reference to SEQ ID No. 44, a cytosine (c) at position 214 with reference to SEQ ID No. 44, or a guanine (g) at position 556 with reference to SEQ ID No. 44. Of course, the coding DNA sequence may have two of the mentioned amino acids at the indicated positons, i.e. a cytosine (c) at position 73 and a cytosine (c) at position 214 with reference to SEQ ID No. 44; a cytosine (c) at position 73 and a guanine (g) at position 556 with reference to SEQ ID No. 44; or a cytosine (c) at position 214 and a guanine (g) at position 556 with reference to SEQ ID No. 44; as well as three of the mentioned amino acids at the indicated positons, i.e. a cytosine (c) at position 73, a cytosine (c) at position 214 and a guanine (g) at position 556 with reference to SEQ ID No. 44.

[0208] In a preferred embodiment, the present invention relates to a nucleic acid molecule encoding a polypeptide which is involved in Rz2 mediated resistance against BNYVV, wherein the polypeptide has the amino acid sequence of SEQ ID No. 8, 12, 16, or 20, or the nucleotide sequence that encodes said polypeptide is SEQ ID No. 5, 6, 7, 9, 10, 11, 13, 14, 15, 17, 18 or 19, or the coding DNA sequence is a nucleotide sequence according to SEQ ID No. 7, 11, 15, or 19.

[0209] Furthermore, substitutions, deletions, insertions, additions, and/or any other change may be introduced into the nucleotide sequence according to the invention that, alone or in combinations, do in fact change the nucleotide sequence, wherein the modified nucleotide sequence may, however, perform the same function as the initial sequence. The present case deals with the coding of an amino acid sequence which is involved in resistance against BNYVV mediated by the Rz2 resistance gene.

[0210] In a further embodiment, the invention therefore includes a nucleotide sequence that encodes a polypeptide which represents a derivative of the polypeptide which is encoded by the nucleotide sequence according to the invention, or which includes the amino acid sequence according to the invention. A derived amino acid sequence which has at least one substitution, deletion, insertion, or addition of one or more amino acids, wherein the functionality of the encoded polypeptide/protein is preserved, represents a derivative of the polypeptide. Substitutions, deletions, insertions, additions, and/or any other change, either solely or in combinations, that do in fact change the nucleotide sequence, but perform the same function as the initial sequence, may thereby be introduced into the nucleotide sequence using conventional methods that are known in the prior art, e.g., via site-directed mutagenesis, PCR-mediated mutagenesis, transposon mutagenesis, genome editing, etc.

[0211] The substitution of one amino acid by a different amino acid having the same or equivalent or similar chemical/physical properties is referred to as a “conservative substitution” or “semi-conservative substitution.” Examples of physical/chemical properties of an amino acid are, for example, hydrophobia or the charge. Which amino acid substitution represents a conservative or semi-conservative substitution is known to the person skilled in the art. Moreover, general expertise allows the person skilled in the art to recognize, identify, and detect which amino acid deletions and additions are harmless to the functionality of the resistance protein, and at which positions these are possible. The person skilled in the art is aware that, in the case of the present functional remorin protein for modifications of the amino acid sequence (substitutions, deletions, insertion, or additions of one or more amino acids), the functionality, in particular, of the conserved domains, e.g. the remorin domain must be preserved, and that therefore only limited preceding modifications are possible in these domains.

[0212] The invention thus includes a functional fragment of the nucleotide sequence according to the invention. The term, “fragment,” thereby includes genes with a nucleotide sequence sufficiently similar to the aforementioned nucleotide sequence. The term, “sufficiently similar,” means that a first nucleotide sequence or amino acid sequence has a sufficient or minimum number of identical or equivalent nucleotides or amino acid groups relative to a second nucleotide sequence or a second amino acid sequence.

[0213] With regard to the amino acid sequence, after modification via an aforementioned method, this also has a common structural domain and/or possesses common functional activity. Nucleotide sequences or amino acid sequences that have an identity of at least approximately 70%, at least approximately 75%, at least approximately 80%, at least approximately 85%, at least approximately 90%, at least approximately 91%, at least approximately 92%, at least approximately 93%, at least approximately 94%, at least approximately 95%, at least approximately 96%, at least approximately 97%, at least approximately 98%, at least approximately 99%, or at least approximately 100% with the nucleotide sequence or amino acid sequence according to the invention are defined here as being sufficiently similar. This also explicitly encompasses the range of 90% to 100%. For the functional fragments, a sufficient similarity is established if the nucleotide sequence or amino acid sequence generally has the same property as the previously-named nucleotide sequence or amino acid sequence of the present invention. Those nucleotide sequences which encode a derivative or for a derived amino acid sequence are generated either directly or indirectly (for example, via amplification or replication steps) from an initial nucleotide sequence which corresponds to the nucleotide sequence according to the invention over the entire length, or at least in part.

[0214] Accordingly, the present invention includes a nucleotide sequence that is able to hybridize, under stringent conditions, with a nucleotide sequence complementary to a nucleotide sequence according to the invention or to the nucleotide sequence that encodes the amino acid sequence according to the invention.

[0215] The present invention further relates to a nucleic acid molecule which specifically hybridizes to the nucleic acid molecule of the present invention and encodes a non-functional allele of the polypeptide, i.e. a non-functional remorin variant, which interferes with resistance against BNYVV mediated by the Rz2 resistance gene in a plant in which the polypeptide is expressed. For the sake of simplicity, this nucleic acid molecule is referred to as “non-functional form”, “non-functional variant”, “non-functional allele”, or “non-functional gene”, or “non-functional nucleic acid molecule” of the present invention.

[0216] As shown in Example 2, in particular in Assay 2, the non-functional polypeptide (remorin) allele seems to be dominant over the functional allele of the polypeptide. Accordingly, in a preferred embodiment of the present invention, the non-functional polypeptide encoded by the nucleic acid molecule according to [3] is dominant over the functional allele of the polypeptide encoded by a nucleic acid molecule according to [1] or [2]. Dominant means that in the heterozygous state of the plant, e.g., the plant comprising a non-functional allele and a functional allele of the polypeptide the non-functional allele inhibits or prevents the development of resistance and as a result the plant is susceptible to BNYVV infection and spread of the virus within the plant, respectively.

[0217] In particular, the non-functional nucleic acid molecule of the present invention is able to reduce or suppress Rz2 mediated resistance to BNYVV in a plant in which the corresponding polynucleotide is expressed. Preferably said plant belongs to the genus Beta, preferably to the species Beta vulgaris, more preferably to the subspecies Beta vulgaris subsp. vulgaris.

[0218] The nucleotide and amino acid encoding sequence of said non-functional allele is characterized by polymorphisms, which differentiates it from the functional allele, i.e. the nucleic acid molecule of the present invention which modifies the Rz2 mediated resistance against BNYVV in a plant in which the polypeptide is expressed. In principle, the sequence of the non-functional gene of the present invention and the corresponding polypeptide, respectively is based on the sequence of the nucleic acid molecule of the present invention as described above but including one or more mutations as already defined above leading to a non-functional variant. There are of course plenty of possibilities for mutations leading to the non-functional variant and the person skilled in the art of course knows how to introduce single mutations and how to test whether the generated gene and polypeptide, respectively is indeed inactive. Details regarding suitable methods are described elsewhere herein.

[0219] In a preferred embodiment, the non-functional nucleic acid molecule of the present invention comprises a nucleotide sequence encoding a polypeptide having an amino acid sequence according to SEQ ID No. 4 or a polypeptide that is of at least approximately 70%, at least approximately 75%, at least approximately 80%, at least approximately 85%, at least approximately 90%, at least approximately 91%, at least approximately 92%, at least approximately 93%, at least approximately 94%, at least approximately 95%, at least approximately 96%, at least approximately 97%, at least approximately 98%, at least 99% or 100% identical to SEQ ID No. 4, wherein the polypeptide comprises an amino acid sequence having at least one amino acid substitution due to one or more mutations in the nucleotide sequence, preferably wherein proline (P) at position 25 with reference to SEQ ID No. 45, proline (P) at position 72 with reference to SEQ ID No. 45, and/or valine (V) at position 186 with reference to SEQ ID No. 45 is substituted with another amino acid. Of course, the amino acid sequence may have one, two or three amino acid substitutions at the indicated positions. Thus, in one embodiment, proline (P) at position 25, proline (P) at position 72, or valine (V) at position 186 with reference to SEQ ID No. 45 is substituted with another amino acid. In a further embodiment, proline (P) at position 25 and proline (P) at position 72 with reference to SEQ ID No. 45 are substituted with another amino acid; or proline (P) at position 25 and valine (V) at position 186 with reference to SEQ ID No. 45 are substituted with another amino acid; or proline (P) at position 72 and valine (V) at position 186 with reference to SEQ ID No. 45 are substituted with another amino acid. Alternatively, proline (P) at position 25, proline (P) at position 72 and valine (V) at position 186 with reference to SEQ ID No. 45 are substituted with another amino acid.

[0220] In a preferred embodiment, the non-functional remorin polypeptide of the present invention comprises an amino acid sequence having alanine (A) instead of proline (P) at position 25 with reference to SEQ ID No. 45, threonine (T) instead of proline (P) at position 72 with reference to SEQ ID No. 45, and/or isoleucine (I) instead of valine (V) at position 186 with reference to SEQ ID No. 45. Of course, the amino acid sequence may have one, two or all three amino acid substitutions at the indicated positions as explained above.

[0221] With respect to the coding DNA sequence, in a preferred embodiment, the non-functional remorin gene of the present invention comprises a nucleotide sequence that comprises the coding DNA sequence according to SEQ ID No. 3, that comprises a coding DNA sequence which is at least 70% identical to the DNA sequence according to SEQ ID No. 3, or that hybridizes with a complementary sequence of SEQ ID No. 3 under stringent conditions, wherein the nucleotide sequence comprises at least one nucleic acid substitution due to at least one mutation leading to an amino acid substitution, preferably wherein one or more nucleotides are substituted at positions 73-75 with reference to SEQ ID No. 44, at positions 214-216 with reference to SEQ ID No. 44 and/or at positions 556-558 with reference to SEQ ID No. 44. Of course, the coding DNA sequence may have substituted nucleotides at one, two or all three positions indicated. Thus, in one embodiment, one or more nucleotides are substituted at positions 73-75, at positions 214-216, or at positions 556-558 with reference to SEQ ID No. 44.

[0222] In a further embodiment, one or more nucleotides are substituted at positions 73-75 and at positions 214-216 with reference to SEQ ID No. 44; or one or more nucleotides are substituted at positions 73-75 and at positions 556-558 with reference to SEQ ID No. 44; or one or more nucleotides are substituted at positions 214-216 and at positions 556-558 with reference to SEQ ID No. 44. Alternatively, one or more nucleotides are substituted at positions 73-75, at positions 214-216, and at positions 556-558 with reference to SEQ ID No. 44.

[0223] In a preferred embodiment, the coding DNA sequence has guanine (g) instead of cytosine (c) at position 73 with reference to SEQ ID No. 44, adenine (a) instead of cytosine (c) at position 214 with reference to SEQ ID No. 44, and/or adenine (a) instead of guanine (g) at position 556 with reference to SEQ ID No. 44. Of course as mentioned above, the coding DNA sequence may have substituted nucleotides at one, two or all three positions indicated.

[0224] Optionally, the coding DNA sequence has in addition adenine (a) instead of guanine (g) at that position 72 with reference to SEQ ID No. 44, and/or adenine (a) instead of guanine (g) at position 111 with reference to SEQ ID No. 44.

[0225] However, as described above with respect to the functional remorin allele, the person skilled in the art of course knows that further substitutions, deletions, insertions, additions, and/or any other change may be introduced that, either alone or in combinations, do in fact change the nucleotide sequence, but perform the same function as the initial sequence—here, the nucleotide sequence encoding the non-functional variant of the remorin gene.

[0226] The nucleic acid molecule according to the invention, including the nucleic acid molecule which is involved in conferring a resistance against the pathogen BNYVV and the corresponding non-functional variant interfering with said resistance, may be an isolated nucleic acid molecule. It is preferably DNA, and, particularly preferably, cDNA (coding DNA). The functional remorin protein is involved in conferring a resistance against the pathogen BNYVV which causes the plant disease rhizomania, more preferably it modifies the Rz2 mediated resistance against BNYVV in a plant in which the protein is expressed, i.e. which increases said resistance to BNYVV or is essential for establishing said resistance. The non-functional remorin protein interferes with said resistance. Furthermore, the polypeptide is involved in conferring a resistance to this pathogen and interferes with said resistance, respectively, in particular in a plant of the genus Beta. The plant is preferably a plant of the species Beta vulgaris—particularly preferably, a plant of the subspecies Beta vulgaris subsp. vulgaris; among these are, for example, the cultivars sugar beet, beetroot, fodder beet, chard, and Swiss chard.

[0227] When not stated otherwise, if referred to the nucleic acid molecule or the polypeptide of the present invention, the nucleic acid molecule and the polypeptide, respectively which is involved in Rz2 mediated resistance against BNYVV, i.e. the function remorin gene and the functional remorin polypeptide/protein, as well as the nucleic acid molecule and the polypeptide, respectively which interferes with the Rz2 mediated resistance against BNYVV, i.e. the non-function remorin gene and the non-functional remorin polypeptide/protein, are included.

[0228] Such a gene that modifies the Rz2 mediated resistance, or that encodes a polypeptide that is able to modify the Rz2 mediated resistance is not known from the prior art. As was already described above, in previously available varieties on the market, it has been observed that certain genetic backgrounds led to a weakening or loss of resistance against BNYVV, although the resistant allele of Rz2 was present the corresponding plants. With the identification of the gene being responsible for this effect, i.e. the non-functional variant of the remorin gene, which allows the generation of suitable markers, it is now possible to diagnose the non-functional remorin allele due to its unique haplotype. Furthermore, the exact knowledge of the genetic and physical positions of the Rz2 gene and the remorin gene allows for the first time to identify recombinants between the genes and thus to separate the non-functional remorin gene from the Rz2 resistance allele. In new crossings with markers located on or between remorin and Rz2, recombinants showing the functional allele of the crossing partner can be selected. Furthermore, the identification of the functional remorin allele allows the incorporation of this gene into plants, e.g. into high-yield varieties, having the Rz2 resistance gene but being no longer resistant to BNYVV due to the presence of the non-functional variant of remorin.

[0229] Thus, via the incorporation of the nucleic acid molecule of the present invention in said plants, i.e. the function remorin gene, optionally in combination with removing the non-functional remorin gene, e.g. via inhibiting its expression at all, or via mutating the non-functional remorin gene in order to establish the functional variant, it is now possible to very quickly develop high-yield varieties with a restored resistance to BNYVV. Accordingly, in the framework of the present invention there are provided for the first time a sugar beet plant, a chard plant, a red beet or beetroot plant, a fodder beet plant having the resistance mediated by the Rz2 gene and the functional remorin gene according to the invention against BNYVV and thus being encompassed by the present invention. As the listed plants are all cultivated plants, crops or plants which are suitable for the agricultural cultivation and which have the resistance according to the invention, are part of the invention. Especially such crops are part of the invention which comprise a subterrestrial storage organ usable as food, raw material or industrial source of sugar and which comprise the resistance according to the invention are a further aspect of the present invention. The storage organ can be for example the sugar containing beet body of the sugar beet, the consumable beet body of the red beet or the feedable beet body of the fodder beet. The subterrestrial storage organ can sum up to more than 50% and for the sugar beet even to more than 70% of the total mass of the full-grown plant. Furthermore, also seeds or seeding material of these plants are part of the invention. The seeds or the seeding material can be technically treated as described further below.

[0230] Furthermore, the present invention relates to a recombinant and/or heterologous DNA molecule that comprises the sequences of the nucleic acid molecule according to the invention, i.e. the nucleic acid molecule involved in Rz2 mediated resistance to BNYVV and the nucleic acid molecule which interferes with said resistance, respectively. This DNA molecule, furthermore, preferably has a regulatory sequence. It may thereby be operatively linked with this regulatory sequence or be under the influence of this regulatory sequence. This regulatory sequence is preferably a promoter sequence and/or other sequences of transcription or translation control elements—for example, cis-elements. The regulatory sequence, which controls the expression of a gene that includes the nucleic acid molecule according to the invention, is preferably a sequence that is able to confer or modulate the expression, as a result of a pathogenic infection. This promoter is preferably able to control the expression of the DNA sequence specifically in roots of the plant. The regulatory sequence may be heterologous to the expressing sequence. Such an approach has the advantage that the person skilled in the art may better adjust the expression rate of the expressing sequence, the tissue in which the expression occurs, and the point in time at which the expression occurs, in that he selects that regulatory sequence which is best suited to the respective use case. The heterologous DNA sequence preferably includes a nucleotide sequence which encodes a component of the plant pathogen defense (example: resistance genes (R-genes) or genes which encode enzymes involved in signal transfer, such as kinases or phosphatases, and for G-protein, or which encode a pathogenic effector (what are known as avirulence genes (avr))). The heterologous DNA sequence may be one of the DNA sequences according to the invention. The heterologous DNA sequence may also additionally encode further components of the plant pathogen defense. The heterologous DNA sequence may therefore be designed such that a polycistronic mRNA is created after its transcription.

[0231] The present invention further relates to a polypeptide which can be encoded by the nucleic acid molecule according to the invention and a functionally and/or immunologically active fragment thereof, as well as an antibody that specifically binds to the polypeptide or to its fragment. The polypeptide particularly preferably has an amino acid sequence according to any one of SEQ ID Nos. 4, 8, 12, 16 and 20. The recombinant production of proteins, polypeptides, and fragments is familiar to the person skilled in the art (Sambrook et al., Molecular Cloning: A Laboratory Manual, 3rd ed., Cold Spring Harbor Laboratory Press, Cold Spring Harbor, N.Y., 2001, or Wingfield, P. T., 2008, Production of Recombinant Proteins, Current Protocols in Protein Science, 52:5.0:5.0.1-5.0.4). Polyclonal or monoclonal antibodies to the protein according to the invention may be produced by the person skilled in the art according to known methods (E. Harlow et al., editor, Antibodies: A Laboratory Manual (1988)). The production of monoclonal antibodies, as well as of Fab and F(ab′)2 fragments that are also useful in protein detection methods, may be performed via various conventional methods (Goding, Monoclonal Antibodies: Principles and Practice, pp. 98-118, New York: Academic Press (1983)). The antibodies may then be used for the screening of expression cDNA libraries in order to identify identical, homologous, or heterologous genes by means of immunological screening (Sambrook et al., Molecular Cloning: A Laboratory Manual, Cold Spring Harbor Laboratory Press, Cold Spring Harbor, N.Y., 1989, or Ausubel et al., 1994, “Current Protocols in Molecular Biology.” John Wiley & Sons), or may be used for western blot analyses.

[0232] In particular, the present invention relates to antibodies that selectively detect a polypeptide encoded by the nucleic acid molecule of the present invention involved in Rz2 mediated resistance to BNYVV, i.e. the functional remorin allele and essentially do not detect the polypeptide encoded by the nucleic acid molecule of the present invention which interferes with said resistance, i.e. the non-functional remorin allele. In particular, they detect less, by a factor of 2—preferably, a factor of 5, and, more preferably, a factor or 10 or more—of the polypeptide encoded by the correspondingly non-functional remorin allele than the polypeptide encoded by the functional remorin allele. In another embodiment, the present invention relates to antibodies that selectively detect a polypeptide encoded by the nucleic acid molecule of the present invention which interferes with the Rz2 mediated resistance to BNYVV, i.e. the non-functional remorin allele and essentially do not detect the polypeptide encoded by the nucleic acid molecule of the present invention which is involved in said resistance, i.e. the functional remorin allele. In particular, they detect less, by a factor of 2—preferably, a factor of 5, and, more preferably, a factor or 10 or more—of the polypeptide encoded by the correspondingly functional remorin allele than the polypeptide encoded by the non-functional remorin allele.

[0233] In a preferred embodiment, the antibody according to the invention is characterized in that it is a synthetic polypeptide which does not occur in nature.

[0234] Furthermore, the antibodies according to the invention may be linked with a fluorescent dye in order to be usable in an immunohistochemical method, for example, and evoke an antibody coloration. The fluorescent dye may be fluorochrome. The antibodies according to the invention may also be present linked with other signaling molecules. Among these are, for example, biotin, radioisotopes, reporter enzymes such as alkaline phosphatase, or oligonucleotides.

[0235] An additional subject matter of the invention are vectors or expression cassettes that include the nucleic acid molecule or the recombinant DNA molecule according to the invention—possibly under control of regulatory elements and, in particular, under control of functional regulatory elements in plants, as well as negative and/or positive selection markers. The vector backbone is thereby heterologous to the nucleic acid molecule according to the invention, which means that such a vector does not occur in nature and cannot be isolated from nature. The vector is a plasmid, a cosmid, a phage or an expression vector, a transformation vector, shuttle vector or cloning vector; it may be double-stranded or single-stranded, linear or circular; or it may transform a prokaryotic or eukaryotic organism either via integration into its genome or extrachromosomally. The nucleic acid molecule or DNA molecule according to the invention in an expression vector or expression cassette is, preferably, operatively linked with one or more regulatory sequences which allow the transcription and, optionally, the expression in a prokaryotic or eukaryotic cell; (Sambrook et al., Molecular Cloning: A Laboratory Manual, 3rd ed., Cold Spring Harbor Laboratory Press, Cold Spring Harbor, N.Y., 2001). These regulatory sequences are preferably promoters or terminators—in particular, a transcription initiation starting point, a ribosome binding location, an RNA-processing signal, a transcription termination location, and/or a polyadenylation signal. For example, the nucleic acid molecule is here under the control of a suitable promoter and/or a terminator. Suitable promotors may be constitutive promotors (example: 35S promoter from the “Cauliflower mosaic virus” (Odell et al., Nature 313 (1985), 810-812); those promoters which are pathogenically inducible are especially suitable (example: PR1 promoter from parsley (Rushton et al., EMBO J. 15 (1996), 5,690-5,700)). Particularly suitable pathogenically-inducible promoters are synthetic or chimeric promoters which do not occur in nature, are composed of multiple elements, and contain a minimal promoter, and have at least one cis-regulatory element upstream of the minimal promoter, which at least one cis-regulatory element serves as a binding location for special transcription factors. Chimeric promoters are designed according to the desired requirements and are induced or repressed via different factors. Examples of such promoters are found in WO 00/29592, WO 2007/147395, and WO 2013/091612. For example, a suitable terminator is the nos-terminator (Depicker et al., J. Mol. Appl. Genet. 1 (1982), 561-573).

[0236] Suitable promoters and terminators may also be the native promoter and the native terminator. The vectors or expression cassettes additionally contain for conventional indicator/reporter genes or resistance genes for the detection of the transfer of the desired vector or DNA molecule/nucleic acid molecule, and for selection of the individuals that contain these, since a direct detection via the expression of the gene is for the most part rather difficult.

[0237] Examples of indicator/reporter genes are, for example, the luciferase gene and the gene encoding green fluorescent protein (GFP). These, furthermore, also allow tests for the activity and/or regulation of a promoter of the gene. Examples of resistance genes—especially, for plant transformations—are the neomycin phosphotransferase gene, the hygromycin phosphotransferase gene, or the gene encoding phosphinothricin acetyltransferase. Additional positive selection markers may be enzymes which provide the transformed plant a selection advantage over the non-transformed plant—in particular, a nutrient advantage, e.g., the mannose-6-phosphate isomerase or the xylose isomerase. However, this does not preclude additional indicator/reporter genes or resistance genes known to the person skilled in the art. In a preferred embodiment, the vector is a plant vector. Furthermore, the expression cassette may be present as integrated into a plant genome.

[0238] In a further aspect, the present invention relates to cells that include the vectors, recombinant DNA molecules, and/or nucleic acid molecules according to the invention. A cell in the sense of the invention may be a prokaryotic (for example, bacterial) or eukaryotic cell (for example, a plant cell or a yeast cell). The cell is preferably an agrobacterium such as Agrobacterium tumefaciens or Agrobacterium rhizogenes, an Escherichia coli cell, or a plant cell; the plant cell is particularly preferably a cell of a plant of the genus Beta, the species Beta vulgaris, or the subspecies Beta vulgaris subsp. vulgaris. The cell may also be present as a culture. The invention also consequently covers a cell culture which contains such cells. The cell culture is preferably a pure culture or an isolate that contains no cells of another type.

[0239] Known to the person skilled in the art are both numerous methods, such as conjugation or electroporation, with which he may introduce the nucleic acid molecule according to the invention, the recombinant DNA molecule, and/or the vector or the expression cassette of the present invention into an agrobacterium, and methods such as diverse transformation methods (biolistic transformation, agrobacterium-mediated transformation) with which he may introduce the nucleic acid molecule according to the invention, the DNA molecule, and/or the vector of the present invention into a plant cell (Sambrook et al., Molecular Cloning: A Laboratory Manual, 3rd ed., Cold Spring Harbor Laboratory Press, Cold Spring Harbor, N.Y., 2001.

[0240] Furthermore, the present invention relates to a plant—preferably, plant of the species Beta vulgaris subsp. vulgaris or a portion thereof—that contains the nucleic acid molecule according to the invention which is involved in resistance against BNYVV, i.e. the functional remorin gene. The nucleic acid molecule of the present invention might be either introduced or introgressed into the genome of the plant. In one embodiment, the nucleic acid molecule of the present invention is foreign to the plant, i.e. it is a heterologous nucleic acid molecule.

[0241] Thus, the plant of the present invention may comprise the nucleic acid molecule according to the invention as a transgene or as endogene or may comprise the vector or expression cassette of the present invention which comprises said nucleic acid molecule as transgene. Furthermore, the plant of the present invention may comprise the cells of the present invention harboring the vector and the nucleic acid molecule of the present invention, respectively. In a preferred embodiment, the plant of the present invention is heterozygous or preferably homozygous for the nucleic acid molecule of the present invention.

[0242] In one embodiment, the plant of the present invention further comprises the Rz2 resistance gene mediating BNYVV resistance endogenously or transgenically. Accordingly, in the framework of the present invention there are provided for the first time a sugar beet plant, a chard plant, a red beet or beetroot plant, a fodder beet plant having the resistance against BNYVV mediated by the Rz2 gene and the functional remorin gene according to the invention.

[0243] A portion of the plant of the present invention may thereby be a cell, a tissue, an organ, or a combination of multiple cells, tissues, or organs. A combination of multiple organs is, for example, a blossom or a seed. A plant of the present invention comprising the Rz2 gene and the functional remorin gene according to the invention preferably shows a higher resistance against BNYVV than a corresponding plant that does contain the Rz2 gene but does not contain the nucleic acid molecule according to the invention, i.e. the functional remorin gene and/or which does contain the nucleic acid molecule of the present invention which interferes with the Rz2 mediated BNYVV resistance, i.e. the non-functional variant of the remorin (control plants). The control plants ideally have the identical genotype as the transgenic plant, and have been cultured under identical conditions, but do not contain the nucleic acid molecule of the present invention involved in Rz2 mediated BNYVV resistance and/or do contain the nucleic acid molecule of the present invention which interferes with the Rz2 mediated BNYVV resistance.

[0244] A plant cell or plant or portion thereof of the present invention that contains the nucleic acid molecule according to the invention—in particular, a plant of the genus Beta—preferably shows a higher resistance to a pathogen—in particular, to BNYVV— than a corresponding plant cell or plant or portion thereof that does not contain the nucleic acid molecule according to the invention, or contains the nucleic acid molecule of the present invention which interferes with the Rz2 mediated BNYVV resistance.

[0245] In the case of a transgenic plant cell, or plant or portion thereof, this comprises the nucleic acid molecule or DNA molecule according to the invention, i.e. the functional remorin gene, as a transgene or the vector or the expression cassette of the present invention. Such a transgenic plant cell or plant or portion thereof is, for example, one that is transformed—preferably, stably—with said nucleic acid molecule, DNA molecule, or with the corresponding vector or the expression cassette. In a preferred embodiment, the nucleic acid molecule is operatively linked with one or more regulatory sequences which allow the transcription and, optionally, the expression in the plant cell. The total structure made up of said nucleic acid molecule and the regulatory sequence(s) then represents the transgene. Such regulatory sequences are, for example, a promoter or a terminator. Numerous functional promoters and terminators that are applicable in plants are known to the person skilled in the art.

[0246] The invention also includes a vacuole of the cell according to the invention, and the content substances stored therein.

[0247] Furthermore, the invention also relates to the cell extract from a cell—preferably, from a plant cell, particularly preferably, from a cell of Beta vulgaris, and, especially preferably, from a cell of one of the following crops: sugar beet, chard, or beetroot. No plant can be regenerated from the cell extract.

[0248] Likewise encompassed by the invention is a plant genome containing the nucleic acid according to the invention, i.e. the functional remorin gene. No plant can be regenerated from the plant genome. Also encompassed by the invention is the use of the cell extract for the production of sugar (sucrose) or for the production of juice—preferably, beetroot juice. Likewise encompassed by the invention is the sugar—in particular, sucrose—contained in the cells according to the invention and their vacuoles.

[0249] An additional aspect of the invention is a seed stock comprising seeds that contain the nucleic acid molecule according to the invention, i.e. the functional remorin gene. Said nucleic acid molecule may be present transgenically or endogenously. The seed stock and the seeds may be technically treated. The invention thus also comprises technically-treated seed stock and technically-treated seeds. The various embodiments of technically-treated seed stock are explained in detail in the following whereby the term seed stock also includes seeds: Technically-treated seed stock may be present in polished form. The outermost layer of the seed is thereby removed, so that the seed assumes a more rounded form. This is helpful in sowing, where an optimally uniform shape leads to a uniform distribution of the seed stock grains. Technically-treated seed stock furthermore encompasses pelleted seed stock. The seed stock is thereby embedded in a pelleting mass that protects the seed stock contained therein and leads to a larger mass, such that the pelleted seed stock shows a greater resistance capability with regard to wind drift and is thus less susceptible to being blown away by the wind, and, at the same time, a more precise positioning during sowing is enabled. In a preferred embodiment of the invention, all pelleted seed stock grains of a batch or unit designated for sale have essentially the same shape and the same mass. Deviations of 5% in diameter and mass are possible. However, the deviations preferably do not exceed 1%. As one of the main components, the pelleting mass may contain for example a mineral compound such as clay, bentonite, kaolin, humus and/or peat, for example. It is possible to add an adhesive material like polyacrylamide. Additional possible components are cited in U.S. Pat. No. 4,067,141. Moreover, the pelleting mass may contain additional chemical agents that positively influence the cultivation in practice. These may here be substances that are counted among fertilizing agents. These include compounds rich of one or more of the following elements: Nitrogen, Phosphorus and Potassium (macronutrients). Therefore, the fertilizing ingredients may contain for example Nitrate nitrogen, Ammonium nitrogen, Magnesium Nitrate, Calcium Ammonium Nitrate, Mono Ammonium Phosphate, Mono Potassium Phosphate and Potassium Nitrate. Furthermore, pelleting mass may contain fungicides, insecticides, and/or antifeedants. The fungicides may be thiram and/or hymexazol and/or other fungicides. The insecticide may be a substance from the neonicotinoid group. The substance from the neonicotinoid group is preferably imidacloprid (ATC Code: QP53AX17) and/or clothianidin (CAS number 210880-92-5). Furthermore, the insecticide may also be cyfluthrin (CAS number 68359-37-5), beta-cyfluthrin or tefluthrin. It is worth mentioned that the compound included in the dressing or pelleting mass are taken up by the plant and show systemic effect thereby providing suitable protection of the whole plant. Plants resulting from pelleted seed including one or more pesticides therefore differ from naturally occurring plants and show better performance under biotic stress conditions. In this context the invention also encompasses a mixture of a pelleting mass and a seed according to the invention. Furthermore, the invention also encompasses a method for producing a pelleted seed according to the invention comprising the following steps:
[0250] a) providing a sugar beet plant seed comprising the nucleic acid according to the invention, i.e. the functional remorin gene,
[0251] b) embedding the sugar beet plant seed in a pelleting mass, and
[0252] c) allowing the pelleting mass to dry, wherein the seed may be optionally a primed or pregerminated seed or the seed may be allowed to be primed during step b).

[0253] The pelleted seed stock is a specific embodiment of dressed seed stock. In this context technically-treated seed stock encompasses also the dressed seed stock. However, the invention is not limited to pelleted seed stock, but, rather, may be applied with any form of dressed seed stock. The invention thus also relates to dressed seed stock, which includes pelleted seed stock, but is not limited to this. Dry dressing, wet dressing, and suspension dressing are thus also encompassed. The dressing may thereby also contain at least one dye (coloring), such that the dressed seed stock may be quickly differentiated from undressed seed stock, and, furthermore, good visibility in the environment is ensured after sowing. The dressing may also contain those agrochemicals which are described in the context of the pilling mass. The invention includes thus such dressed seed stock whereby the dressing contains at least one anti-feedant such as an insecticide and/or at least one fungicide. Optionally, so called electonical dressing (dressing by application of electric energy) may be applied. However, electronic dressing is not a dressing in the strict sense of the word.

[0254] An additional form of technically-treated seed stock is encrusted seed stock. What is known as coating is also spoken of in this context as well as of seed stock treated with a coating. The difference to pelleted seed stock is that the seed grains retain their original shape, wherein this method is especially economical. The method is described in EP 0 334 258 A1, for example. An additional form of technically-treated seed stock is sprouted or primed seed stock. Sprouted seed stock is pretreated via a pre-germination, whereas primed seed stock has been pretreated via a priming (“germination”). Pre-germinated and primed seed stock have the advantage of a shorter emergence time. The point in time of the emergence after sowing is, at the same time, more strongly synchronized. This enables better agrotechnical processing during cultivation and especially during the harvest, and, additionally, increases the yield quantity. In pre-germination, the seed stock is germinated until the radicle exits the seed stock shell, and the process is subsequently stopped. In the priming, the process is stopped before the radicle exits the seed stock shell. Compared to pre-germinated seed stock, seed stock that has been subjected to a priming is insensitive to the stress of a re-drying and, after such a re-drying, has a longer storage life in comparison to pre-germinated seed stock, for which a re-drying is generally not advised. In this context, technically pre-treated seed stock also includes primed and re-dried seed stock. The process of pre-germination is explained in U.S. Pat. No. 4,905,411 A. Various embodiments of priming are explained in EP 0 686 340 A1. In addition to this, it is also possible to simultaneously pill and prime seed stock in one process. This method is described in EP 2 002 702 B1. Primed seed stock which is moreover pelleted, is encompassed by the present invention.

[0255] The technically-treated seed stock may additionally be furnished with one or more of the herbicide resistances explained above. This allows a further-improved agrotechnical cultivation, since the technically-treated seed stock may be deployed on a field that has previously been treated with weed killer, and that therefore is weed-free.

[0256] In addition to this, the invention also encompasses a mixture containing the seed stock according to the invention or the seeds according to the invention, and a dressing mass as defined above. The dressing mass is thereby preferably embodied as a pelleting mass, as defined above.

[0257] With storage of seed stock according to the invention, storage conditions are preferably to be chosen that do not negatively affect the stability or storage life of the seed stock. Fluctuations in humidity may, especially, have a disadvantageous effect here. Part of the invention is a method for the storage of the seed stock in a bag or container that is via simultaneously water-repellent and breathable. Such a bag or container may be designed as a carton or packing. Such a carton or packing may optionally possess an inner vapor barrier. If the carton or packing is designed as a duplex carton, its stability increases. A container, bag, carton or packing comprising the seed stock according to the invention, or technically-treated seed stock according to the invention, is likewise a part of the invention. It is likewise part of the invention to store seed stock according to the invention or technically-treated seed stock according to the invention in such a bag, container, packing or carton.

[0258] In one embodiment, the plant according to the invention is a hybrid plant or a double haploid plant. Hybrid plants and double haploid plants do not occur in nature and cannot be isolated from nature. In a further embodiment of the plant according to the invention, the nucleic acid molecule according to the invention which is involved in Rz2 mediated resistance to BNYVV is present in heterozygous or more preferably in homozygous form. The invention also encompasses hybrid seeds and double haploid seeds which contain said nucleic acid molecule or the corresponding polypeptide.

[0259] A further embodiment of the present invention comprises a plant—preferably, of the species Beta vulgaris—that is characterized in that the resistance to BNYVV in this plant is further increased. For example, this may be realized by means of “gene stacking,” i.e. the resistance is increased using this dose effect. For this, the plants according to the invention that contain the BNYVV resistance-conferring Rz2 gene and the nucleic acid molecule of the present invention which is involved in the Rz2 mediated resistance are over-transformed with at least the latter one or alternative with both mentioned genes in order to increase the amount of the transcription of the gene(s) in the plant. Further possibilities for conferring, restoring or increasing the resistance to BNYVV in a plant of the species Beta vulgaris comprising the Rz2 resistance gene are described below.

[0260] An additional embodiment of the present invention relates to a sugar beet plant or a portion thereof or a pelleted seed of such a plant which is harvestable before bolting because no bolting of the sugar beet plant occurs during the first 10, 11, 12, 13, 14 or 15 months after germination and the development of a beet body is finished during this period.

[0261] In one embodiment of the present invention the sugar beet plant or a portion thereof or a pelleted seed of such a plant has a genome allowing the development of a beet body having a mass summing up to at least 50%, 60%, 70%, 80% or even 90% of the total mass of the full-grown plant.

[0262] In another embodiment of the present invention the sugar beet plant or a portion thereof or a pelleted seed of such a plant has a genome allowing the development of a beet body having a minimum mass of 200 g, 250 g, 300 g, 350 g, 400 g, 450 g or 500 g and a maximum mass of 1000 g, 1100 g, 1200 g, 1300 g, 1400 g, 1500 g, 1600 g, 1700 g, 1800 g, 1900 g or even 2000 g via photosynthesis.

[0263] An additional embodiment of the present invention is directed to a sugar beet plant or a portion thereof or a pelleted seed of such a plant wherein the genome of the sugar beet plant allows development of a beet body having a sucrose concentration of at least 10%, 11%, 12%, 13%, 14%, 15%, 16%, 17%, 18%, 19% or even 20%.

[0264] The present invention further encompasses a method for conferring, restoring or increasing the resistance to BNYVV in a plant of the species Beta vulgaris comprising the Rz2 resistance gene endogenously or transgenically mediating BNYVV resistance. Possible ways for conferring, restoring or increasing said resistance are listed in the following, however without being limited to those.

[0265] Conferring, increasing and/or restoring the resistance against BNYVV may take place via integration of the nucleic acid molecule according to the invention, i.e. the functional remorin gene, into the genome of at least one cell of a plant of the species Beta vulgaris, as well as possible regeneration of a plant from the plant cell. The integration may take place both by means of sexual crossing, e.g., crossing of a plant of the genus Beta comprising the Rz2 resistance gene mediating BNYVV resistance endogenously or transgenically with a plant comprising the functional remorin gene of the present invention, optionally in combination with the Rz2 resistance gene, and subsequent selection, and by means of homology-directed repair or homologous recombination. The two latter methods cited are preferably supported by site-directed nucleases which may be selected from, but are not limited to, the following: CRISPR nuclease, including Cas9, CasX, CasY, or Cpf1 nuclease, TALE nuclease, zinc finger nuclease, meganuclease, Argonaut nuclease, restriction endonuclease, including FokI or a variant thereof, recombinase, or two, site-specific, nicking endonucleases.

[0266] Another way for conferring, increasing and/or restoring the resistance against BNYVV may take place via transformation of a plant cell with the nucleic acid molecule according to the invention, i.e. the functional remorin gene, the corresponding recombinant DNA molecule, or with the vector or the expression cassette of the invention, and regeneration of the transgenic plant from the transformed plant cell.

[0267] In general, the activity and/or stability of the polypeptide which is encoded by the nucleic acid molecule of the present invention which modifies the Rz2 mediated resistance to BNYVV, i.e. the functional remorin gene as well as the expression of the corresponding nucleic acid molecule can be increased via modification of the nucleic acid sequence of the functional remorin gene and/or its native promoter.

[0268] The mutations leading to said modifications can be either performed within the organism itself, or it is possible to modify the corresponding nucleic acids chemically in an isolated state to achieve the desired effects. The advantage of the latter approach is that the compounds can be edited even more precisely.

[0269] The method for the production of an organism which comprises a mutated version of the nucleic acid molecule according to the above given embodiment [1] or [2] and/or a mutated version of the native promoter includes the following steps:
[0270] (I) provision of an organism or a cell comprising the nucleic acid molecule and/or the promoter;
[0271] (II) increase of the mutation rate of the organism or the cell or mutagenesis of the organism or the cell;
[0272] (III) phenotypic selection of an organism, which as a result of a mutation exhibits an altered resistance or altered resistance level towards BNYVV or genotypic selection of an organism or a cell which comprises a mutation in the nucleic acid molecule and/or the promoter, wherein the mutation has been created via step (II); and, optionally
[0273] (IV) regeneration of the organism from the cell obtained via step (III).

[0274] The organism can be a plant. Preferably the plant is a Beta vulgaris. However, it is also possible to use unicellular organisms as bacteria. The bacterium can be E. coli. If the organism is a plant then the method can be applied in vivo as well as in vitro. If the organism is a plant and the method is applied in vitro, a cell culture of the plant may be established and the increase of the mutation rate or the mutagenization may occur in the cell culture. The increase of the mutation rate encompasses for example the application of mutagenic agents like for example 5-bromouracil or ethylmethane sulfonate (EMS) or the application of physical mutagens like ionizing radiation or UV light. The mutagenization encompasses also the targeted mutagenesis. The targeted mutagenesis can be achieved by precise methods as gene editing (as explained further below). The regeneration of organism out of cells is explained in various standard references of the cell biology. The regeneration of plants is for example explained in the standard reference “Plant biotechnology: comprehensive biotechnology, second supplement” (Michael W. Fowler, Graham Warren, Murray Moo-Young—Pergamon Press—1992). The regeneration of Beta vulgaris out of the cell culture is described in Lindsey & Gallois (1990).

[0275] These references also describe how plant cell cultures are established. The mutated version of the nucleic acid molecule respectively the promoter characterizes themselves preferably due to the expression rate of the nucleic acid molecule of the present invention, i.e. the functional remorin gene which is increased by the mutation. Such an effect can also rely on the presence of several mutations. For example, it is possible to introduce two, three, four, five or more mutations in the promoter or the nucleic acid molecule.

[0276] By the introduction of mutations thus more resistance imparting protein can be built in the cell or the protein has a better effect. Thereby, the resistance in comparison to a control plant comprising the unaltered nucleic acid molecule according to the invention, i.e. the functional remorin gene, can be increased for example by at least 1, 2, 3, 4, 5 or more percent. The increase can be measured as explained further below. Moreover, the resistance due to the mutation or mutations can be increased by at least one rating score. The determination of rating scores is explained elsewhere herein. Furthermore, the protein modifying the Rz2 mediated resistance can impart—as a result of the mutations—an altered effect and in some circumstances can exhibit effect against such pathogens which have adapted themselves to the initial resistance mechanism. In this context the invention encompasses also such mutated variants of the nucleic acids according to the invention and mutated variants of the protein according to the invention. Preferably the invention encompasses such variants which do not occur in nature and cannot be isolated from nature to make sure that the pathogen had no opportunity to adapt itself to such variants. The above described method for the production of an organism which comprises a mutated version of the nucleic acid molecule may furthermore include a further step, in which those organisms or respectively plants are identified, which have a further increased resistance due to the mutation or mutations. If an increase of resistance has taken place may be determined by the herein explained rating scores or the measuring of the resistance level.

[0277] As already mentioned before, besides the above described method for the production of organisms which comprise a mutated version of the nucleic acid molecule or of the promoter it is also possible to modify the according nucleic acids chemically in an isolated state to achieve the desired effects. For this purpose, the following method is offered:

[0278] Production of a chemically modified nucleic acid molecule according to the above given embodiment [1] or [2] and/or a chemically modified promoter comprises the following steps:
[0279] (I) provision of the nucleic acid molecule as stated above in isolated form;
[0280] (II) chemical modification of the nucleic acid molecule or the promoter by one of the following steps:
[0281] (IIa) mutagenization,
[0282] (IIb) gene editing,
[0283] (IIc) restriction and ligation respectively insertion or deletion.

[0284] Furthermore, chemical modifications can be generated by such approaches as stated elsewhere herein in context of allelic variants. The gene editing given under step (II) above is equal to the term “Genome-Editing”. Optionally the chemically modified nucleic acid molecule or the chemically modified promoter can be subsequently introduced into a cell or can be stably integrated. With the help of such a cell, the chemically modified nucleic acid molecule and the modified promoter can be propagated in context of the cell proliferation. They can be subsequently isolated in vast number and expression analyses may be performed. Expression analyses are especially suitable when the chemical modification concerns the promoter. It is possible to harvest the cells and to isolate the chemically modified resistance protein for chemical analyses. If the cell which comprises the chemically modified nucleic acid molecule or the modified promoter is a plant cell, a complete plant may be regenerated out of this cell. The approaches described within this passage can be performed subsequently to the above given method for the production of a modified form of the nucleic acid molecule and/or a modified promoter and the obtained variants are also a part of this invention. Moreover, a plant comprising the chemically modified nucleic acid molecule or the modified promoter are also part of the invention. Thus, the invention is also related to a plant obtained by this method. Furthermore, the invention relates also to the chemically modified nucleic acid molecules obtained by this method and to the encoded polypeptides. These compounds may be optimized versions of the original (not modified) compounds, wherein the resulting resistance level—as explained further above—may be increased by at least by 1, 2, 3, 4, 5, or more percent or may be increased by at least one rating score. In this regard the method for the production of a chemically modified nucleic acid molecule is also a method for the optimization of the nucleic acid molecule. The method for optimization may furthermore contain an additional step, in which those modified variants of the nucleic acid molecule are identified which lead in comparison to the unamended variants to an increased resistance in a plant.

[0285] In one embodiment, increasing said resistance to BNYVV can be performed via increasing the expression of the nucleic acid molecule of the present invention which modifies the Rz2 mediated resistance to BNYVV, i.e. the functional remorin gene, in the plant. This may take place via modification of the native promoter, wherein the modification preferably takes place by means of gene editing or site-directed mutagenesis which is mediated via site-directed nucleases, and, optionally, repair models. Examples of such nucleases have already been cited above. The increase in the expression of the nucleic acid molecule according to the invention may likewise take place via fusion of the nucleic acid molecule with a heterologous promoter, which exhibits a higher activity in comparison to the native promoter—in particular, after BNYVV infection. The fusion may likewise take place via site-directed nuclease and repair models, but also by means of direct insertion after double-strand break.

[0286] As has already been mentioned above, a method for increasing the BNYVV resistance, may also be performed via increasing the activity and/or stability of the polypeptide according to the invention, via modification of the nucleotide sequence of the nucleic acid molecule according to the invention and may be performed by means of the techniques known to the person skilled in the art. This approach is explained in detail further below.

[0287] All the mentioned approaches dealing either with the introduction of the nucleic acid molecule of the present invention, i.e. the functional remorin gene, into the genome of a target plant or via modification of said nucleic acid molecule to increase its expression and the stability/activity of the corresponding protein can be optionally performed in combination with inhibiting the expression of the non-functional remorin allele.

[0288] Alternatively, a method for conferring, restoring or increasing the resistance against BNYVV might be performed via mutagenesis of a plant or plant cells comprising the nucleic acid molecule of the present invention interfering with the BNYVV resistance, i.e. the non-functional remorin allele and screening and optionally selecting for plants or plant cells in which a functional allele of the polypeptide encoded by the functional remorin allele has been restored and/or the expression of the non-functional polypeptide has been abolished. This can be performed by means of random or directed mutagenesis of the nucleic acid sequence of the non-functional remorin gene. Examples of polymorphisms which differentiate the sensitive allele from the resistant allele are presented in Tables 1 and 2.

[0289] For example, the non-functional allele may be modified via gene mutation by means of TALE nucleases (TALEN's) or zinc finger nucleases (ZFN's), as well as CRISPR/Cas systems, which—among other things—are described by way of example in WO 2014/144155 A1 (Engineering plant genomes using CRISPR/Cas systems) and in Osakabe & Osakabe, Plant Cell Physiol., 56 (2015), 389-400. This may also be achieved via use of the method designated as TILLING (Targeted Induced Local Lesions in Genomes), wherein it is described, e.g., in the German patent application DE 10 2013 101 617, how point mutations are caused in a sensitive gene, and plants are subsequently selected that exhibit a suitable, i.e., resistance-conferring, mutation, e.g., a barley resistant to yellow mosaic virus; see DE 10 2013 101 617 on pp. 4, 8, and 12, in paragraphs [0014], [0026], and [0038]. The TILLING method is also described in detail in the publication by Henikoff et al. (Henikoff et al., Plant Physiol. 135, 2004, 630-636).

[0290] In order to enable a break at a predetermined target site, the enzymes for targeted mutagenesis preferably include a binding/recognition domain and a cleavage domain. Particular enzymes capable of inducing double or single-stranded breaks are nucleases or nickases (DSBI—double strand break inducing- or SSBI—single strand break inducing—enzymes) as well as variants thereof, including such molecules no longer comprising a nuclease or nickase function but rather operating as recognition molecules in combination with another enzyme. In recent years, many suitable nucleases, especially tailored endonucleases have been developed comprising meganucleases, zinc finger nucleases, TALE nucleases, Argonaute nucleases, derived, for example, from Natronobacterium gregoryi, and CRISPR nucleases, comprising, for example, Cas9, Cpf1, Csm1, CasX or CasY nucleases as part of the Clustered Regularly Interspaced Short Palindromic Repeats (CRISPR) system. Thus, in a preferred aspect of the invention, the genome engineering component comprises a DSB- or SSB-inducing enzyme or a variant thereof selected from a CRISPR/Cas endonuclease, preferably a CRISPR/Cas9 endonuclease a CRISPR/Cpf1 endonuclease, or a CRISPR/Csm1 endonuclease, a zinc finger nuclease (ZFN), a homing endonuclease, a meganuclease and a TAL effector nuclease.

[0291] Rare-cleaving endonucleases are DSBI/SSBI enzymes that have a recognition site of preferably about 14 to 70 consecutive nucleotides, and therefore have a very low frequency of cleaving, even in larger genomes such as most plant genomes. Homing endonucleases, also called meganucleases, constitute a family of such rare-cleaving endonucleases. They may be encoded by introns, independent genes or intervening sequences, and present striking structural and functional properties that distinguish them from the more classical restriction enzymes, usually from bacterial restriction-modification Type II systems. Their recognition sites have a general asymmetry which contrast to the characteristic dyad symmetry of most restriction enzyme recognition sites. Several homing endonucleases encoded by introns or inteins have been shown to promote the homing of their respective genetic elements into allelic intronless or inteinless sites. By making a site-specific double strand break in the intronless or inteinless alleles, these nucleases create recombinogenic ends, which engage in a gene conversion process that duplicates the coding sequence and leads to the insertion of an intron or an intervening sequence at the DNA level. A list of other rare cleaving meganucleases and their respective recognition sites is provided in Table I of WO 03/004659 (pages 17 to 20) (incorporated herein by reference).

[0292] Furthermore, methods are available to design custom-tailored rare-cleaving endonucleases that recognize basically any target nucleotide sequence of choice. Briefly, chimeric restriction enzymes can be prepared using hybrids between a zinc-finger domain designed to recognize a specific nucleotide sequence and the non-specific DNA-cleavage domain from a natural restriction enzyme, such as FokI. Such methods have been described e.g. in WO 03/080809, WO 94/18313 or WO 95/09233 and in Isalan et al. (2001). A rapid, generally applicable method to engineer zinc fingers illustrated by targeting the HIV-1 promoter. Nature biotechnology, 19(7): 656; Liu et al. (1997). Design of polydactyl zinc-finger proteins for unique addressing within complex genomes. Proceedings of the National Academy of Sciences, 94(11): 5525-5530.

[0293] Another example of custom-designed endonucleases includes the TALE nucleases (TALENs), which are based on transcription activator-like effectors (TALEs) from the bacterial genus Xanthomonas fused to the catalytic domain of a nuclease (e.g. FokI or a variant thereof). The DNA binding specificity of these TALEs is defined by repeat-variable di-residues (RVDs) of tandem-arranged 34/35-amino acid repeat units, such that one RVD specifically recognizes one nucleotide in the target DNA. The repeat units can be assembled to recognize basically any target sequences and fused to a catalytic domain of a nuclease create sequence specific endonucleases (see e.g. Boch et al. (2009). Breaking the code of DNA binding specificity of TAL-type III effectors. Science, 326(5959), 1509-1512; Moscou & Bogdanove (2009). A simple cipher governs DNA recognition by TAL effectors. Science, 326(5959), 1501-1501; and WO 2010/079430, WO 2011/072246, WO 2011/154393, WO 2011/146121, WO 2012/001527, WO 2012/093833, WO 2012/104729, WO 2012/138927, WO 2012/138939). WO 2012/138927 further describes monomeric (compact) TALENs and TALEs with various catalytic domains and combinations thereof.

[0294] Recently, a new type of customizable endonuclease system has been described; the so-called CRISPR/Cas system. A CRISPR system in its natural environment describes a molecular complex comprising at least one small and individual non-coding RNA in combination with a Cas nuclease or another CRISPR nuclease like a Cpf1 nuclease or a Csm1 nuclease (Zetsche et al., “Cpf1 Is a Single RNA-Guides Endonuclease of a Class 2 CRISPR-Cas System”, Cell, 163, pp. 1-13, October 2015; US 2017/0233756 A1) which can produce a specific DNA double-stranded break. Presently, CRISPR systems are categorized into 2 classes comprising five types of CRISPR systems, the type II system, for instance, using Cas9 as effector and the type V system using Cpf1 as effector molecule (Makarova et al., Nature Rev. Microbiol., 2015). In artificial CRISPR systems, a synthetic non-coding RNA and a CRISPR nuclease and/or optionally a modified CRISPR nuclease, modified to act as nickase or lacking any nuclease function, can be used in combination with at least one synthetic or artificial guide RNA or gRNA combining the function of a crRNA and/or a tracrRNA (Makarova et al., 2015, supra). The immune response mediated by CRISPR/Cas in natural systems requires CRISPR-RNA (crRNA), wherein the maturation of this guiding RNA, which controls the specific activation of the CRISPR nuclease, varies significantly between the various CRISPR systems which have been characterized so far. Firstly, the invading DNA, also known as a spacer, is integrated between two adjacent repeat regions at the proximal end of the CRISPR locus. Type II CRISPR systems code for a Cas9 nuclease as the key enzyme for the interference step, which system contains both a crRNA and also a trans-activating RNA (tracrRNA) as the guide motif. These hybridize and form double-stranded (ds) RNA regions which are recognized by RNAseIII and can be cleaved in order to form mature crRNAs. These then in turn associate with the Cas molecule in order to direct the nuclease specifically to the target nucleic acid region. Recombinant gRNA molecules can comprise both the variable DNA recognition region and also the Cas interaction region and thus can be specifically designed, independently of the specific target nucleic acid and the desired Cas nuclease.

[0295] As a further safety mechanism, PAMs (protospacer adjacent motifs) must be present in the target nucleic acid region; these are DNA sequences which follow on directly from the Cas9/RNA complex-recognized DNA. The PAM sequence for the Cas9 from Streptococcus pyogenes has been described to be “NGG” or “NAG” (Standard IUPAC nucleotide code) (Jinek et al, “A programmable dual-RNA-guided DNA endonuclease in adaptive bacterial immunity”, Science 2012, 337: 816-821). The PAM sequence for Cas9 from Staphylococcus aureus is “NNGRRT” or “NNGRR(N)”. Further variant CRISPR/Cas9 systems are known. Thus, a Neisseria meningitidis Cas9 cleaves at the PAM sequence NNNNGATT. A Streptococcus thermophilus Cas9 cleaves at the PAM sequence NNAGAAW. Recently, a further PAM motif NNNNRYAC has been described for a CRISPR system of Campylobacter (WO 2016/021973 A1). For Cpf1 nucleases it has been described that the Cpf1-crRNA complex, without a tracrRNA, efficiently recognize and cleave target DNA proceeded by a short T-rich PAM in contrast to the commonly G-rich PAMs recognized by Cas9 systems (Zetsche et al., supra). Furthermore, by using modified CRISPR polypeptides, specific single-stranded breaks can be obtained. The combined use of Cas nickases with various recombinant gRNAs can also induce highly specific DNA double-stranded breaks by means of double DNA nicking. By using two gRNAs, moreover, the specificity of the DNA binding and thus the DNA cleavage can be optimized. Further CRISPR effectors like CasX and CasY effectors originally described for bacteria, are meanwhile available and represent further effectors, which can be used for genome engineering purposes (Burstein et al., “New CRISPR-Cas systems from uncultivated microbes”, Nature, 2017, 542, 237-241).

[0296] The cleavage site of a DSBI/SSBI enzyme relates to the exact location on the DNA or RNA where the break is induced. The cleavage site may or may not be comprised in (overlap with) the recognition site of the DSBI/SSBI enzyme and hence it is said that the cleavage site of a DSBI/SSBI enzyme is located at or near its recognition site. The recognition site of a DSBI/SSBI enzyme, also sometimes referred to as binding site, is the nucleotide sequence that is (specifically) recognized by the DSBI/SSBI enzyme and determines its binding specificity. For example, a TALEN or ZNF monomer has a recognition site that is determined by their RVD repeats or ZF repeats respectively, whereas its cleavage site is determined by its nuclease domain (e.g. FokI) and is usually located outside the recognition site. In case of dimeric TALENs or ZFNs, the cleavage site is located between the two recognition/binding sites of the respective monomers, this intervening DNA or RNA region where cleavage occurs being referred to as the spacer region.

[0297] A person skilled in the art would be able to either choose a DSBI/SSBI enzyme recognizing a certain recognition site and inducing a DSB or SSB at a cleavage site at or in the vicinity of the preselected/predetermined site or engineer such a DSBI/SSBI enzyme. Alternatively, a DSBI/SSBI enzyme recognition site may be introduced into the target genome using any conventional transformation method or by crossing with an organism having a DSBI/SSBI enzyme recognition site in its genome, and any desired nucleic acid may afterwards be introduced at or in the vicinity of the cleavage site of that DSBI/SSBI enzyme.

[0298] As used herein, a “double-stranded DNA break inducing enzyme”, “enzyme inducing a double-stranded break”, or “DSBI enzyme” is an enzyme capable of inducing a double-stranded DNA break at a particular nucleotide sequence, called the “recognition site” or “predetermined site” or “predetermined location”. Accordingly, a “single-stranded DNA or RNA break inducing enzyme”, “enzyme inducing a single-stranded break”, or “SSBI enzyme” is an enzyme capable of inducing a single-stranded DNA or RNA break at a particular nucleotide sequence, called the “recognition site” or “predetermined site” or “predetermined location”.

[0299] As used herein, a “repair nucleic acid molecule” or “repair matrix” is a single-stranded or double-stranded DNA molecule or RNA molecule that is used as a template for modification of the genomic DNA or the RNA at the preselected site in the vicinity of or at the cleavage site. As used herein, “use as a template for modification of the genomic DNA”, means that the repair nucleic acid molecule is copied or integrated at the preselected site by homologous recombination between the flanking region(s) and the corresponding homology region(s) in the target genome flanking the preselected site, optionally in combination with non-homologous end joining (NHEJ) at one of the two end of the repair nucleic acid molecule (e.g. in case there is only one flanking region).

[0300] As used herein, “a modification of the genome”, means that the genome has changed in at least one nucleotide or by at least one epigenetic editing.

[0301] As used herein “a preselected site”, “a predetermined site” or “predefined site” indicates a particular nucleotide sequence in the genome (e.g. the nuclear genome or the chloroplast genome) at which location it is desired to insert, replace and/or delete one or more nucleotides.

[0302] In various embodiments, the at least one base editor according to the present invention is temporarily or permanently linked to at least one site-specific DSBI/SSBI enzyme complex or at least one modified site-specific DSBI/SSBI enzyme complex, or optionally to a component of said at least one site-specific DSBI/SSBI enzyme complex. The linkage can be covalent and/or non-covalent. Any base editor or site-specific DSBI/SSBI enzyme complex, or a catalytically active fragment thereof, or any component of a base editor complex or of a site-specific DSBI/SSBI enzyme complex as disclosed herein can be introduced into a cell as a nucleic acid fragment, the nucleic acid fragment representing or encoding a DNA, RNA or protein effector, or it can be introduced as DNA, RNA and/or protein, or any combination thereof.

[0303] The base editor is a protein or a fragment thereof having the capacity to mediate a targeted base modification, i.e., the conversion of a base of interest resulting in a point mutation of interest. Preferably, the at least one base editor in the context of the present invention is temporarily or permanently fused to at least one DSBI/SSBI enzyme, or optionally to a component of at least one DSBI/SSBI. The fusion can be covalent and/or non-covalent. Multiple publications have shown targeted base conversion, primarily cytidine (C) to thymine (T), using a CRISPR/Cas9 nickase or non-functional nuclease linked to a cytidine deaminase domain, Apolipoprotein B mRNA-editing catalytic polypeptide (APOBEC1), e.g., APOBEC derived from rat. The deamination of cytosine (C) is catalyzed by cytidine deaminases and results in uracil (U), which has the base-pairing properties of thymine (T). Most known cytidine deaminases operate on RNA, and the few examples that are known to accept DNA require single-stranded (ss) DNA. Studies on the dCas9-target DNA complex reveal that at least nine nucleotides (nt) of the displaced DNA strand are unpaired upon formation of the Cas9-guide RNA-DNA ‘R-loop’ complex (Jore et al., Nat. Struct. Mol. Biol., 18, 529-536 (2011)). Indeed, in the structure of the Cas9 R-loop complex, the first 11 nt of the protospacer on the displaced DNA strand are disordered, suggesting that their movement is not highly restricted. It has also been speculated that Cas9 nickase-induced mutations at cytosines in the non-template strand might arise from their accessibility by cellular cytosine deaminase enzymes. It was reasoned that a subset of this stretch of ssDNA in the R-loop might serve as an efficient substrate for a dCas9-tethered cytidine deaminase to effect direct, programmable conversion of C to U in DNA (Komor et al., supra). Recently, Goudelli et al., Programmable base editing of A·T to G·C in genomic DNA without DNA cleavage, Nature, 2017, 551(7681), 464, described adenine base editors (ABEs) that mediate the conversion of A·T to G·C in genomic DNA.

[0304] These methods preferably lead to an improvement in the resistance by at least one rating score—particularly preferably, to an improvement in the resistance by at least two, three, or more rating scores. After mutagenesis of the plant cells and subsequent regeneration of plants from the mutagenized plant cells, or mutagenesis of plants, the plants may then be identified that exhibit one or more mutations, as depicted in Tables 1 and 2, in an endogenous nucleic acid molecule. In this context, the already mentioned plant according to the invention may be characterized by that the resistance is increased by at least one rating score, preferably by at least two or more rating scores. Alternatively, the resistance of the plants according to the invention may be increased for example by at least 1, 2, 3, 4, 5 or more percent in comparison to a control plant, which does not comprise the nucleic acid according to the invention and/or which comprises the non-functional variant thereof. The increase can be measured by inoculation of one healthy leaf with an isolate of the pathogen and the determination of the infested surface after 15 days. A reduce of 5% of the infested surface corresponds to an increase of the resistance of 5%. Further parameters for the conduction of the measuring can be derived from the below given embodiment “resistance test”.

[0305] The method for production of a BNYVV-resistant plant comprising the nucleic acid molecule of the present invention, i.e. the functional remorin gene, alternatively includes, as described above, the provision of a plant of the genus Beta or a plant cell of the genus Beta comprising the Rz2 resistance gene mediating BNYVV resistance endogenously or transgenically, transformation of said plant cell with the nucleic acid molecule of the present invention, i.e. the functional remorin gene, or the corresponding vector or expression cassette and regeneration of a transgenic plant from the transformed plant cell.

[0306] In an alternative embodiment, the method for production of a BNYVV-resistant plant comprises the provision of a plant of the genus Beta or a plant cell of the genus Beta comprising the Rz2 resistance gene mediating BNYVV resistance endogenously or transgenically, the introduction of a site-directed nuclease or nickase and optionally a repair matrix or a site-directed base editor into a cell of the plant, wherein the site-directed nuclease is able to generate at least one single-strand break of the DNA or at least one double-strand break of the DNA in the genome of the cell—preferably in the nucleic acid molecule of the present invention interfering with the BNYVV resistance, i.e. the non-functional remorin, or upstream or downstream from said nucleic acid molecule—and the repair matrix comprises the nucleic acid molecule according to the invention which is involved in BNYVV resistance, i.e. the functional remorin gene, or wherein the site-directed base editor is able to generate at least one single-strand break of the DNA at one of the mentioned locations and to convert at least one nucleobase. The nucleobases which are preferably to be converted are listed in Table 1, above. The method furthermore optionally includes the cultivation of the generated cell under conditions that allows modification of the genome at the mentioned location, wherein the modification can be a replacement, a deletion and/or an insertion of at least one nucleotide. The modification might optionally occur by homology-directed repair or homologous recombination, wherein the nucleic acid molecule is integrated into the genome of the plant. However, substitution of single nucleotide might also occur with base editors, e.g. CRISPR tools; thus the repair matrix is not necessarily required. Furthermore, the regeneration of a plant from the modified plant cell is encompassed.

[0307] The method for production of a BNYVV-resistant plant comprising the nucleic acid molecule of the present invention, i.e. the functional remorin gene, alternatively includes the crossing of a plant of the genus Beta comprising the Rz2 resistance gene mediating BNYVV resistance endogenously or transgenically with a plant comprising the functional remorin gene of the present invention, optionally in combination with the Rz2 resistance gene, and identifying and optionally selecting a plant comprising the Rz2 resistance gene and the nucleic acid molecule of the present invention, i.e. the functional remorin gene both endogenously or transgenically, wherein the Rz2 resistance gene and/or said nucleic acid molecule of the present invention is present homozygously in the genome of the plant.

[0308] The present invention likewise relates to a method for the identification, and possibly the provision, of a plant of the species Beta vulgaris, of a portion or a seed thereof comprising the nucleic acid molecule of the present invention, i.e. the functional remorin gene, and which is capable of exhibiting resistance against BNYVV mediated by the Rz2 gene, characterized in that the method includes a step of the detection of the presence and/or of the expression of said nucleic acid molecule or of the encoded polypeptide in the plant or a sample, a portion or a seed thereof. Accordingly, the presence and expression, respectively, of said nucleic acid molecule indicates that the plant is capable of exhibiting Rz2 mediated resistance against BNYVV. Alternatively, the absence and lack of expression, respectively, of said nucleic acid molecule and/or the presence and/or expression of the nucleic acid molecule of the present invention interfering with the resistance against BNYVV, i.e. the non-functional remorin gene indicates that the plant is not capable of or impaired in exhibiting Rz2 mediated resistance against BNYVV. In addition, the method may include the identification and optionally selection of the plant of the species Beta vulgaris, the portion or the seed thereof comprising the nucleic acid molecule of the present invention, i.e. the functional remorin gene, which is capable of exhibiting resistance against BNYVV mediated by Rz2, if present in the genome of the plant.

[0309] In the same way, the present invention relates to a method for the identification and optionally selection of a plant of the species Beta vulgaris comprising the nucleic acid molecule of the present invention which interferes with the resistance against BNYVV, i.e. the non-functional remorin gene, characterized in that the method includes a step of the detection of the presence and/or of the expression of said nucleic acid molecule or of the encoded polypeptide in the plant or a sample, a portion or a seed thereof.

[0310] The presence and/or the expression of a nucleic acid molecule according to the invention, or of the polypeptide according to the invention, may be tested by means of standard methods known to the person skilled in the art, e.g., by means of PCR, RT-PCR, or Western Blot.

[0311] With the fine mapping, the position of the remorin gene in the genome of Beta vulgaris subsp. vulgaris has been determined, and the gene itself and the surrounding sequence regions have been identified. In particular, remorin is positioned about 0.75 cM distal to the Rz2 gene on the long arm of chromosome 3. This in turn represents the basis for the development of DNA hybridization probes or genetic markers in the target region allowing to distinguish between plants comprising the functional remorin allele and plants comprising the non-functional remorin allele and allowing to develop markers in one or more coseggregating regions which can be used to identify recombinants between the genes and thus to separate the repressor allele from the Rz2 resistance allele. The genetic position of both genes in relation to each other are shown in FIG. 7.

[0312] DNA hybridization probes may be derived from the sequence of the remorin gene and be used for the screening of genomic and/or cDNA banks of the desired organism. The probes may be used to amplify identified homologous genes via the known process of polymerase chain reaction (PCR), and to check whether the remorin gene is present endogenously in an organism, or has been successfully introduced heterologously.

[0313] The person skilled in the art may here resort to customary hybridization, cloning, and sequencing methods, which, for example, are listed in Sambrook et al., Molecular Cloning: A Laboratory Manual, 3rd ed., Cold Spring Harbor Laboratory Press, Cold Spring Harbor, N.Y., 2001. The person skilled in the art may also synthesize and use oligonucleotide primers to amplify sequences of the remorin gene. In order to achieve a specific hybridization, such probes should be specific and have at least a length of 15 nucleotides—preferably, at least 20 nucleotides. A detailed guide to hybridization of nucleic acids may be found in Tijssen, Laboratory Techniques in Biochemistry and Molecular Biology—Hybridization with Nucleic Acid Probes, Part 1, Chapter 2, “Overview of principles of hybridization and the strategy of nucleic acid probe assays.” Elsevier, New York (1993); and in Current Protocols in Molecular Biology, Chapter 2, Ausubel et al., eds., Greene Publishing and Wiley Interscience, New York (1995).

[0314] Thus, in one embodiment, the present invention relates to oligonucleotides of at least 15, 16, 17, 18, 19, or 20—preferably, at least 21, 22, 23, 24, or 25, particularly preferably, at least 30, 35, 40, 45, or 50, and, especially preferably, at least 100, 200, 300, 500 or 1,000—nucleotides in length that specifically hybridize with a nucleotide sequence of the nucleic acid molecule according to the invention which is involved in Rz2 mediated resistance against BNYVV, or that specifically hybridize with a nucleotide sequence of the nucleic acid molecule according to the invention which interferes with the resistance against BNYVV, or the nucleic acid molecules that are complementary to both nucleic acid sequences. Furthermore, the invention relates to a pair of nucleic acid molecules—preferably, in the form of oligonucleotides—that is suitable for attachment as a forward and reverse primer to a region that is specific to one of said nucleic acid molecules, and for amplifying these in a polymerase chain reaction (PCR).

[0315] The present invention thus also relates to markers as oligonucleotides—in particular, primer oligonucleotides. These comprise a nucleic acid molecule of at least 15 nucleotides in length that specifically hybridizes with a nucleotide sequence defined as in the preceding.

[0316] In particular, the present invention encompasses a pair of nucleic acid molecules—preferably, in the form of oligonucleotides or a kit containing this pair of oligonucleotides—that is suitable for hybridization as a forward and reverse primer to a region that is specific to the nucleic acid molecule according to the invention, and for amplifying this in a polymerase chain reaction (PCR), or that is suitable as a forward and reverse primer for hybridization to a region in the Beta vulgaris genome that, in Beta vulgaris, exhibits a cosegregation with the nucleic acid molecule according to the invention which is involved in Rz2 mediated resistance against BNYVV, i.e. with the functional remorin gene, or with the nucleic acid molecule according to the invention which interferes with the resistance against BNYVV, i.e. the non-functional remorin gene. Alternatively or additionally, the oligonucleotide or the pair of oligonucleotides is suitable for hybridization to a region in the Beta vulgaris genome that, in Beta vulgaris, cosegregates with the functional remorin gene together with the Rz2 gene, or with the non-functional remorin gene together with the Rz2 gene.

TABLE 3
Markers flanking remorin and the Rz2 gene as shown in FIG. 7.

| | | | nucleobases in | |
|---|---|---|---|---|
| | | | the genome of | |
| | | | Beta vulgaris | |
| | genetic | physical | comprising the | |
| marker | position | position | non-functional | SEQ ID |
| name | [cM] | [bp] | remorin gene | No: |
| s3e5985s01 | 36.9318639 | 7077769 | C | 33 |
| sxh1002s02 | 39.0210334 | 7957425 | G | 34 |
| sxh2499s01 | 39.9958561 | 8403820 | A | 35 |
| sxi0698s01 | 40.5090706 | 8648395 | T | 36 |
| sxh8485s01 | 42.3807876 | 9605012 | A | 37 |
| sxe7357s01 | 42.8377616 | 9856523 | C | 38 |
| sxn1017s02 | 43.6903085 | 10348480 | T | 39 |
| s3e2247xxx | 45.7583869 | 11699138 | A | 40 |

[0317] In a preferred embodiment, the oligonucleotide or the pair of oligonucleotides of the present invention is selected from the group consisting of those set forth in SEQ ID Nos. 24 to 40. In particular, 74 markers have been identified between remorin and Rz2, three of which are exemplified in FIG. 7: s3e5782s01 (SEQ ID NO: 30; non-functional allele: T), s3e4913xxx (SEQ ID NO: 31; non-functional allele: T) and s3e5800s01 (SEQ ID NO: 32; non-functional allele: T). FIG. 7 also shows marker positions distal to Remorin and proximal to Rz2, which define flanking areas that can be used for marker assisted breeding (MAS) with the aim of introducing a functional remorin. These markers and their respective genetic and physical positions are shown in Tables 3 to 5.

TABLE 4
Markers located between remorin and the Rz2 gene as shown
in FIG. 7.

| | | | nucleobases in | |
|---|---|---|---|---|
| | | | the genome of | |
| | | | Beta vulgaris | |
| | genetic | physical | comprising the | |
| marker | position | position | non-functional | SEQ ID |
| name | [cM] | [bp] | remorin gene | No: |
| s3e5782s01 | 41.15 | 8961406 | T | 30 |
| s3e4913xxx | 41.38 | 9079399 | T | 31 |
| s3e5800s01 | 41.73 | 9260730 | T | 32 |

TABLE 5
Markers located in the remorin gene as shown in FIG. 7.

| | | | nucleobases in | |
|---|---|---|---|---|
| | | | the genome of | |
| | | | Beta vulgaris | |
| | genetic | physical | comprising the | |
| marker | position | position | non-functional | SEQ ID |
| name | [cM] | [bp] | remorin gene | No: |
| s3p4348s01 | ~41.0 | 8886686 | G | 27 |
| s3p4349s01 | ~41.0 | 8886781 | T | 28 |
| s3p4351s01 | ~41.0 | 8891242 | T | 29 |

[0318] Furthermore, the oligonucleotide according to the invention may be connected to a fluorescent dye in order to generate a fluorescence signal, e.g., under excitation via light of the corresponding wavelength. The fluorescent dye may be fluorochrome. The oligonucleotides according to the invention may be coupled with other compounds that are suitable for generating a signal. Such oligonucleotides do not occur in nature and also cannot be isolated from nature. The following is executed to produce such marked oligonucleotides: DNA may be marked bio-orthogonally. For this, DNA may be marked in vivo or in vitro with nucleoside analogs, which, for example, may subsequently be coupled with a fluorophore per Staudinger reaction. In addition to this, DNA may also be chemically provided with fluorophores. Oligonucleotides may be marked via a phosphoramidite synthesis with fluorophores that, for example, are used in QPCR, DNA sequencing, and in situ hybridization. Furthermore, DNA may be generated enzymatically in the course of a polymerase chain reaction with fluorescent nucleotides, or be marked with a ligase or a terminal deoxynucleotidyl transferase. DNA may also be detected indirectly via a biotinylation and fluorescent avidin. For couplings, fluorescein, fluorescent lanthanides, gold nanoparticles, carbon nanotubes, or quantum dots, among other things, are used as fluorophores. One of the most commonly used fluorescent substances is FAM (carboxyfluorescein). Consequently, oligonucleotides and, in particular, primers that possess a FAM marking are encompassed by the invention. FAM is preferably present as 6-FAM, wherein—depending upon the desired wavelength of the emission and excitation—other FAM variants, e.g., 5-FAM, may, however, also be used. Examples of additional fluorescence markers are AlexaFluor, ATTO, Dabcyl, HEX, Rox, TET, Texas Red, and Yakima Yellow. Depending upon the field of use, the oligonucleotides may be furnished with modifications of the bases or of the sugar phosphate spine. Among these are, among others, amino-dT, azide-dT, 2-aminopurine, 5-Br-dC, 2′-deoxyinosine (INO), 3′-deoxy-A, C, G, 5-Met-dC, 5-OH-Met-dCN6-Met-dA, and others.

[0319] Thus, the identification method according to the invention also includes the detection of the nucleic acid molecule according to the invention, i.e. the functional remorin gene, by means of detection of at least one polymorphism between the functional remorin gene and the non-functional remorin gene, i.e. between the sequences of the nucleic acid molecule according to the invention which is involved in Rz2 mediated resistance against BNYVV and the sequences of the variant of the nucleic acid molecule according to the invention which interferes with said resistance, using molecular markers that detect one or more polymorphisms. Examples for those polymorphisms are given in Table 1. Accordingly, the presence of at least one marker locus in the nucleotide sequence of the nucleic acid molecule of the present invention, i.e. the functional remorin gene, or in a cosegregating region, indicates that the plant is capable of exhibiting Rz2 mediated resistance against BYNVV. Alternatively, the absence of a marker locus in the nucleotide sequence of said nucleic acid molecule and/or or the presence of at least one marker locus in the nucleotide sequence of the nucleic acid molecule of the present invention interfering with the resistance against BNYVV, i.e. the non-functional remorin gene or in a cosegregating region indicates that the plant is not capable of or impaired in exhibiting Rz2 mediated resistance against BNYVV. In addition, the method may include the identification and optionally selection of the plant of the species Beta vulgaris, the portion or the seed thereof comprising the nucleic acid molecule of the present invention, i.e. the functional remorin gene, which is capable of exhibiting resistance against BNYVV mediated by Rz2, if present in the genome of the plant.

[0320] Following the same principle, a plant comprising the nucleic acid molecule according to the invention which interferes with the BNYVV resistance, i.e. the non-functional remorin gene, can be identified.

[0321] In a preferred embodiment of the present invention, the non-functional remorin variant comprises the nucleic acid and amino acid sequence, respectively as defined above, i.e. having the specific nucleic acid and amino acid substitutions, respectively as shown in Tables 1 and 2 and depicted in FIGS. 2 and 3. A preferred embodiment of the method according to the invention consequently includes the detection of at least one polymorphism that is presented in FIG. 2 using molecular markers which detect the polymorphisms—in particular, diagnostic polymorphisms. This detection preferably occurs using at least one molecular marker per polymorphism—in particular, per diagnostic polymorphism. It is known to the person skilled in the art which marker techniques are to be applied to detect a corresponding polymorphism, and how molecular markers for this are constructed (see Advances in Seed Science and Technology Vol. I, Vanangamudi et al., 2008).

[0322] As already outlined above, the identification method of the invention includes a step of detecting at least one marker locus in a region cosegregating with the nucleic acid molecule of the present invention. Preferably the cosegregating region is a genomic interval in Beta vulgaris on chromosome 3 which comprises and is flanked by marker loci detectable by means of

[0323] (i) the markers s3e5985s01 (SEQ ID No. 33) and s3p4348s01 (SEQ ID No. 27), and/or

[0324] (ii) the markers s3p4351s01 (SEQ ID No. 29) and s3e2247xxx (SEQ ID No. 40), preferably by means of

[0325] (i) the markers sxh1002s02 (SEQ ID No. 34) and s3p4348s01 (SEQ ID No. 27), and/or

[0326] (ii) the markers s3p4351s01 (SEQ ID No. 29) and sxn1017s02 (SEQ ID No. 39), more preferably means of

[0327] (i) the markers sxh2499s01 (SEQ ID No. 35) and s3p4348s01 (SEQ ID No. 27), and/or

[0328] (ii) the markers sxi0698s01 (SEQ ID No. 36) and s3p4348s01 (SEQ ID No. 27), and/or

[0329] (iii) the markers s3p4351s01 (SEQ ID No. 29) and sxe7357s01 (SEQ ID No. 38), and/or

[0330] (iv) the markers s3p4351s01 (SEQ ID No. 29) and sxh8485s01 (SEQ ID No. 37), and/or

[0331] (v) the markers s3p4351s01 (SEQ ID No. 29) and s3e5853s01 (SEQ ID No. 26), and/or

[0332] (vi) the markers s3p4351s01 (SEQ ID No. 29) and s3e5800s01 (SEQ ID No. 32), and/or

[0333] (vii) the markers s3p4351s01 (SEQ ID No. 29) and s3e4913xxx (SEQ ID No. 31), and/or

[0334] (viii) the markers s3p4351s01 (SEQ ID No. 29) and s3e5782s01 (SEQ ID No. 30).

[0335] The location of the markers in visualized in FIG. 7.

[0336] The method of the present invention used for the identification of a plant of the species Beta vulgaris comprising the nucleic acid molecule of the present invention, i.e. the functional remorin gene, and which is capable of exhibiting resistance against BNYVV mediated by the Rz2 gene, if present in the genome of the plant, is characterized by optionally further comprising the detection of the presence and/or expression of the Rz2 gene or the presence of the polypeptide encoded by the Rz2 gene in the plant, the portion thereof or the seed thereof; and/or the detection of at least one marker locus in the Rz2 gene or in one or more regions cosegregating with the Rz2 gene, preferably cosegregating with a chromosomal interval comprising the nucleic acid molecule of the present invention, i.e. the functional remorin gene, and the Rz2 gene. Accordingly, the identified and optionally selected plant, the portion thereof or the seed thereof comprises said nucleic acid molecule and the Rz2 gene.

[0337] In a preferred embodiment of said method, the at least one marker locus in the nucleotide sequence of the Rz2 gene is detectable by means of the marker s3e5853s01 (SEQ ID No. 26) and wherein the in one or more regions cosegregating with the Rz2 gene are genomic intervals in Beta vulgaris on chromosome 3 which comprise and are flanked by marker loci detectable by means of

[0338] (i) the markers s3p4351s01 (SEQ ID No. 29) and s3e5853s01 (SEQ ID No. 26), and/or

[0339] (ii) the markers s3e5853s01 (SEQ ID No. 26) and s3e2247xxx (SEQ ID No. 40), preferably by means of

[0340] (i) the markers s3p4351s01 (SEQ ID No. 29) and s3e5853s01 (SEQ ID No. 26), and/or

[0341] (ii) the markers s3e5853s01 (SEQ ID No. 26) and sxn1017s02 (SEQ ID No. 39), more preferably means of

[0342] (i) the markers s3p4351s01 (SEQ ID No. 29) and s3e5853s01 (SEQ ID No. 26), and/or

[0343] (ii) the markers s3e5853s01 (SEQ ID No. 33) and sxe7357s01 (SEQ ID No. 38), and/or

[0344] (iii) the markers s3e5853s01 (SEQ ID No. 26) and sxh8485s01 (SEQ ID No. 37).

[0345] In an alternative preferred embodiment of said method, the in one or more regions cosegregating with the chromosomal interval comprising the nucleic acid molecule of the present invention, i.e. the functional remorin gene, and the Rz2 gene are genomic intervals in Beta vulgaris on chromosome 3 which comprise and are flanked by marker loci detectable by means of

[0346] (i) the markers s3e5985s01 (SEQ ID No. 33) and s3p4348s01 (SEQ ID No. 27), and/or

[0347] (ii) the markers s3e5853s01 (SEQ ID No. 26) and s3e2247xxx (SEQ ID No. 40), preferably by means of

[0348] (i) the markers sxh1002s02 (SEQ ID No. 34) and s3p4348s01 (SEQ ID No. 27), and/or

[0349] (ii) the markers s3e5853s01 (SEQ ID No. 26) and sxn1017s02 (SEQ ID No. 39), more preferably means of

[0350] (i) the markers sxh2499s01 (SEQ ID No. 35) and s3p4348s01 (SEQ ID No. 27), and/or

[0351] (ii) the markers sxi0698s01 (SEQ ID No. 36) and s3p4348s01 (SEQ ID No. 27), and/or

[0352] (iii) the markers s3e5853s01 (SEQ ID No. 26) and sxe7357s01 (SEQ ID No. 38), and/or

[0353] (iv) the markers s3e5853s01 (SEQ ID No. 26) and sxh8485s01 (SEQ ID No. 37).

[0354] The oligonucleotides or the pairs of oligonucleotides of the present invention are used for identifying and/or selecting a plant of the species Beta vulgaris capable exhibiting resistance to BNYVV mediated by Rz2, if present in the genome of the plant, or which capability of resistance to BNYVV mediated by Rz2, if present in the genome of the plant, is impaired.

[0355] Furthermore, the present invention also relates to a marker chip (“DNA chip” or microarray) which contains at least one oligonucleotide according to the invention that is suitable for detection. The marker chip is suitable for application in one or more detection methods according to the invention.

[0356] The invention likewise includes a method for production of the protein according to the invention. The method includes the provision or cultivation of a cell culture which contains the nucleic acid molecule of the present invention, i.e. the functional and non-functional remorin gene, respectively, and the subsequent expression of the corresponding protein.

[0357] Furthermore, the present invention also relates to a BNYVV-resistant plant or a portion thereof which was identified, and, if applicable, selected, via a method as described above. In particular, the present invention relates to a population of plants comprising plants that are available according to one of the methods of the invention as described above, and that preferably are resistant to rhizomania, i.e. to BNYVV infestation, and are characterized by the presence of a nucleic acid molecule according to the invention which is involved in conferring Rz2 mediated resistance against BNYVV, i.e. the functional remorin gene. The population preferably has at least 10—preferably, at least 50, more preferably, at least 100, particularly preferably, at least 500, and, particularly in agricultural farming, preferably at least 1,000—plants. The proportion of plants in the population that do not carry said nucleic acid molecule, do carry the nucleic acid molecule according to the present invention which interferes with the BNYVV resistance, i.e. the non-functional remorin, and/or are susceptible to BNYVV is preferably below 25% —preferably, below 20%, more preferably, below 15%, even more preferably, 10%, and, in particular, preferably below 5%, if present at all.

[0358] The following advantages for the breeding and development of new resistant plant lines of the genus Beta may also be achieved via the present invention. Sequence information, as well as the identified polymorphisms which allow a differentiation between functional and non-functional variants of the disclosed gene, i.e. between the alleles that are involved in Rz2 mediated BNYVV resistance and the alleles interfering with said resistance, enable the marker development directly in the gene, as described above, as well as in the upstream and downstream regions, which represents an important improvement for the plant breeder—in particular, with regard to the development of optimized elite lines without “linkage drag.” Moreover, knowledge about the sequential structure may be used for the identification of additional remorin or remorin-like genes which are homologous or orthologous, for example.

[0359] Therefore, the present invention also encompasses a method for the identification of additional nucleic acid molecules encoding polypeptides or additional proteins that are involved in Rz2 mediated resistance against BNYVV in a plant in which the polypeptide is expressed. The person skilled in the art may thereby use databases, employing suitable search profiles and computer programs for the screening for homologous sequences or for sequence comparisons. Moreover, by means of conventional molecular biology techniques, the person skilled in the art may himself derive additional DNA sequences encoding remorin proteins, and use these within the scope of the present invention. For example, suitable hybridization probes may be derived from the sequence of the nucleic acid molecule according to the invention and be used for the screening of genomic and/or cDNA banks of the desired organism. The person skilled in the art may here resort to customary hybridization, cloning, and sequencing methods, which, for example, are listed in Sambrook et al., Molecular Cloning: A Laboratory Manual, 3rd ed., Cold Spring Harbor Laboratory Press, Cold Spring Harbor, N.Y., 2001. Using known sequences, the person skilled in the art may also synthesize and use oligonucleotide primers to amplify sequences of Rz2 resistance-involved nucleic acid molecules, nucleic acid molecules encoding polypeptides or additional proteins that are involved in Rz2 mediated resistance against BNYVV in a plant, or nucleic acid molecules encoding other or new remorin alleles.

[0360] In one embodiment, the present invention therefore encompasses a method for the identification of a nucleic acid molecule which encodes a polypeptide that is involved in conferring a resistance against BNYVV in a plant of the species Beta vulgaris in which the polypeptide is expressed. The method thereby includes the comparison of the amino acid sequence of the polypeptide according to the invention with amino acid sequences from a sequence database, or with sequences of allelic variants of the polypeptide according to the invention in genotypes of the species Beta vulgaris. Furthermore, the method according to the invention includes the identification of an amino acid sequence or of an allelic variant that is at least 80% identical to the amino acid sequence of the polypeptide according to the invention, as well as the introduction of a nucleic acid molecule encoding the identified amino acid sequence or allelic variant in a plant of the species Beta vulgaris comprising the Rz2 resistance gene; expression of the nucleic acid molecule in said plant; and, optionally, subsequent verification of the resistance against BNYVV.

[0361] As described in the preceding, additional proteins being involved in Rz2 mediated BNYVV resistance or their coding genes, i.e., homologs, analogs, and orthologs, that are at least 70% —preferably, at least 80%, particularly preferably, at least 90%, especially preferably, at least 95%, or even 98%—identical to the amino acid sequence of the polypeptide which is encoded by the nucleic acid molecule according to the invention may be identified via classical bioinformatic approaches (database searches and computer programs for screening for homologous sequences).

[0362] The term, homolog(s), thereby means that the genes concerned (from two different plant species) have essentially the same function and a common ancestor, and therefore typically show a significant identity in their nucleic acid or coded amino acid sequences. However, there are also many genes that are homologous to one another, without protein sequences resulting in a meaningful paired alignment. In contrast to this, the term, analog(s), describes genes or proteins that (likewise) have an identical or similar function, but are not created from the same structure, i.e., have no common ancestor. In this case, often, no significant identity can be established in their nucleic acid or encoded amino acid sequence, or, in the best case, in specific functional domains.

[0363] In the context of genome sequencing, homologs are, for annotation, more finely classified. The terms, orthology and paralogy, have been introduced for this. Orthologs are genes that are connected via a speciation event. Paralogs are genes that trace back to a duplication event.

[0364] A gene is fundamentally a homolog or analog or ortholog in the sense of the present invention if it is involved in conferring Rz2 mediated BNYVV resistance in a plant. To verify this, methods which have already been described in the preceding and known to the person skilled in the art are used, e.g., the amplification of the identified homolog or analog or ortholog by means of PCR, cloning in expression vectors, introduction into the target plant or plant cell, and checking the resistance.

[0365] The present invention also relates to the use of the nucleic acid molecule of the present invention, i.e. the functional remorin allele, in a genetic or molecular stack with other genetic elements which may confer agronomically advantageous properties to the plant. The economic value of cultivated plants may thereby be markedly increased, in that, for example, the yield performance is increased in comparison to plants that possess the same genetics, but have not been furnished with said nucleic acid molecule or which comprise the non-functional variant of the nucleic acid molecule of the present invention. In particular, the present invention relates to the use of the identified remorin gene in methods for controlling an infestation with the pathogen BNYVV in the agricultural or horticultural cultivation of plants of the genus Beta, e.g., encompassing the identification and selection of plants of the genus Beta with the aid of one of the methods described in the preceding and/or the cultivation of the plants so selected or descendants thereof. The present invention thus includes a method for the cultivation of plants of the species Beta vulgaris, including, in a first step, the provision of BNYVV-resistant plants of the species Beta vulgaris according to the invention, or the production of plants of the species Beta vulgaris with the aid of the production method according to the invention, or the identification and selection of plants of the species Beta vulgaris with the aid of the identification method according to the invention that has been described in the preceding, wherein the provision may include planting the corresponding seedlings or sowing the corresponding seeds of the present invention; and including, in a second step, the cultivation of the plants from the first step, or the deployment of seed stock of the plants from the first step, or the raising of plants from the first step. The cultivation method thereby counteracts an infestation of the cultivated plants by BNYVV. The cultivation method may be part of a method for producing sugar. The method for the production of sugar includes the steps of the cultivation method, and additionally, as a penultimate step, the harvesting of the cultivated plants, and, as a last step, the extraction of sugar from the aforesaid plants.

[0366] The cultivation method may also be part of a method for producing seed stock. The method for the production of seed stock includes the steps of the cultivation method, and additionally, as a penultimate step, the vernalization of the cultivated plants, and, as a last step, the extraction of seeds from the aforesaid plants.

[0367] The extracted seeds may optionally be pelleted, in order to obtain pelleted seed stock of the species Beta vulgaris. In this instance, it is a method for the production of pelleted seed stock. Moreover, the method for the production of seed stock may be designed as a method for the production of BNYVV-resistant seed stock. The method for the production of BNYVV-resistant seed stock includes the steps of the method described above for the production of seed stock, and additionally, as a last step, the verification of the nucleic acid according to the invention, i.e. the functional remorin gene according to a method described herein in at least one of the extracted seeds—preferably, in at least 0.1% or in at least 1% of the extracted seeds. The verification is particularly preferably implemented so that the seed remains germinable. This means that the extraction of the DNA required for verification from the seed does not neutralize the germinability of the seed. In such an instance, the verification of the nucleic acid according to the invention may have taken place in an especially large proportion of all extracted seeds. For example, the verification may take place in at least 2%—preferably, at least 3%, particularly preferably, at least 4%—of all extracted seeds.

[0368] The plants according to the invention, their cells, or seeds or seed stock according to the invention may possess additional, agronomically advantageous properties, or be furnished with such. One example is the tolerance or resistance to an herbicide such as glyphosate, glufosinate, or ALS inhibitors. The tolerance to glyphosate or an ALS-inhibitor herbicide is preferred. A specific embodiment of the glyphosate resistance is disclosed in U.S. Pat. No. 7,335,816 B2. Such a glyphosate resistance is, for example, available from seed stock stored at the NCIMB, Aberdeen (Scotland, UK), under the access number, NCIMB 41158 or NCIMB 41159. Such seeds may be used in order to obtain a glyphosate-tolerant sugar beet plant. The glyphosate resistance may also be introduced into other species of the genus Beta via crossing.

[0369] A specific embodiment of the ALS-inhibitor herbicide resistance is disclosed in the document, WO2012/049268 A1. For example, such an ALS-inhibitor herbicide resistance is available from a deposit of NCIMB, Aberdeen, UK, under the number NCIMB 41705. Furthermore, such an ALS-inhibitor resistance may be produced via tilling or site-directed mutagenesis, e.g., via gene editing, such as through the use of CRISPR/Cas, CRISPR/Cpf1, TALENS or zinc finger nucleases. Numerous additional herbicides and their applicability are known to the person skilled in the art from the prior art. He may resort to the prior art in order to achieve knowledge of which genetic elements are to be used in what manner in order to implement a corresponding tolerance in plants.

[0370] Further examples of agronomically advantageous properties are additional pathogen resistances, wherein pathogens may be amongst other insects, viruses, nematodes, bacteria, or fungi, cold tolerance or frost tolerance as well as water usage efficiency, nitrogen usage efficiency, and yield. Here, the person skilled in the art may also resort to the prior art to find suitable genetic elements.

[0371] In addition to relating to the plant according to the invention, the present invention also relates to seeds or descendants, or to an organ, a plant part, a tissue, or a cell thereof in the production of products that are typically produced from sustainable raw materials, such as foodstuffs and animal feed—preferably, sugar or syrup (molasses), wherein the molasses is also used for industrial applications, e.g., in alcohol production or as a growing medium for the production of biotechnological products, in the production of materials or substances for the chemical industry, e.g., refined chemicals, pharmaceuticals or precursors thereof, diagnostics, cosmetics, bioethanol, or biogas. An example of the use of sugar beet as a biogenic raw material in biogas plants is described in the application DE 10 2012 022 178 A1; see, for example, paragraph 10.

[0372] The following examples explain the invention, but without limiting the subject matter of the invention. Unless indicated otherwise, standard molecular biology methods have been used; see, for example, Sambrook et al., Molecular Cloning: A Laboratory Manual, 3rd ed., Cold Spring Harbor Laboratory Press, Cold Spring Harbor, N.Y., 2001, Fritsch et al., Cold Spring Harbor Laboratory Press: 1989; Mayer et al., Immunochemical Methods in Cell and Molecular Biology, eds., Academic Press, London, 1987, and Weir et al., Handbook of Experimental Immunology, Volumes I-IV, Blackwell, eds., 1986.

[0373] Some of the most important sequences according to the invention are explained in detail in the following:

[0374] SEQ ID No. 2—genomic sequence of the non-functional remorin gene (haplotype 1)

[0375] SEQ ID No. 3—open reading frame of the non-functional remorin gene (haplotype 1)

[0376] SEQ ID No. 4—amino acid sequence of the non-functional remorin polypeptide (haplotype 1)

[0377] SEQ ID No. 6—genomic sequence of the functional remorin gene (haplotype 2)

[0378] SEQ ID No. 7—open reading frame of the functional remorin gene (haplotype 2)

[0379] SEQ ID No. 8—amino acid sequence of the functional remorin polypeptide (haplotype 2)

[0380] SEQ ID No. 10—genomic sequence of the functional remorin gene (haplotype 3)

[0381] SEQ ID No. 11—open reading frame of the functional remorin gene (haplotype 3)

[0382] SEQ ID No. 12—amino acid sequence of the functional remorin polypeptide (haplotype 3)

[0383] SEQ ID No. 14—genomic sequence of the functional remorin gene (haplotype 4)

[0384] SEQ ID No. 15—open reading frame of the functional remorin gene (haplotype 4)

[0385] SEQ ID No. 16—amino acid sequence of the functional remorin polypeptide (haplotype 4)

[0386] SEQ ID No. 18—genomic sequence of the functional remorin gene (haplotype 5)

[0387] SEQ ID No. 19—open reading frame of the functional remorin gene (haplotype 5)

[0388] SEQ ID No. 20—amino acid sequence of the functional remorin polypeptide (haplotype 5)

[0389] SEQ ID No. 51—nucleotide sequence encoding Rz2

[0390] SEQ ID No. 52—amino acid sequence of Rz2 variant A

[0391] SEQ ID No. 53—amino acid sequence of Rz2 variant B

[0392] SEQ ID No. 54—nucleotide sequence including the functional remorin gene (haplotype 5), flanking regions and Rz2

[0393] SEQ ID No. 55—nucleotide sequence including the non-functional remorin gene (haplotype 1), flaking regions and Rz2

### EXAMPLES

### Example 1: Identification and Genetic Mapping of a Gene being Involved in Rz2 Mediated BNYVV Resistance, i.e. the Functional Remorin Gene, as Well as of the Variant Interfering with Said Resistance, i.e. the Non-Functional Remorin Gene

[0394] In order to localize the non-functional remorin gene leading after expression of the corresponding polypeptide to suppression of the Rz2 mediated BNYVV resistance in plants of the species Beta vulgaris, genetic mapping has been performed. For this purpose, two Beta vulgaris lines comprising the Rz2 resistance allele were crossed, wherein one parent line comprised the non-functional remorin gene and the second parent line was resistant to rhizomania. The gene of interest could then be genetically localized in the offspring population near the Rz2 locus. However, this area still contained too many genes to name a specific candidate.

[0395] Parallel to genetic mapping, the patterns of molecular markers in multigenic breeding material were analyzed. Five genotypes with a recombination between the Rz2 gene and the predicted locus containing the non-functional remorin gene were self-pollinated. Phenotypic resistance data were collected from 20 plants of the offspring. A variance analysis was performed and markers were determined. The marker s3e5798s01 (allele X: A, allele Y: G; primer allele X (SEQ ID NO: 24), primer allele Y (SEQ ID NO: 25)) showed the highest evidence for the positioning of the remorin gene. The genetic position of the marker is 40.99598509 cM on chromosome 3 of a genetic map. The physical position of the underlying SNP on the reference sequence (SBKv7) is 8,887,000 bp on chromosome 3.

[0396] Thus, this marker is genetically located only about 0.75 cM and physically about 381 kbp away from the RZ-2 resistance gene, detectable for example by marker s3e5853s01 (SEQ ID NO: 26) at genetic position 41.7471132 cM on chromosome 3 (physical position: 9,268,704 bp).

[0397] Analysis of the reference sequence for this region showed that the marker s3e5798s01 (SEQ ID NOs. 24 and 25) is located in an annotated gene model (g23238.t1), wherein the gene contains a remorin domain (C-terminal region).

[0398] Furthermore, genetic fine mapping has been performed to better resolve the region of interest. In particular recombinants were searched for which show the different allele combinations of Rz2 (BNYVV resistant) and remorin (presence of the non-function allele—yes (A)/no (B); FIG. 8). For this purpose, 2730 plants of a dividing population were analyzed with markers. There are sufficient genetic markers between the Rz2 gene and the identified remorin gene to reliably identify such recombinants; see FIG. 8. These recombinants were then tested again in the resistance test: In the test of progeny, genotypes at the H positions (=heterozygous for the non-functional allele) split 1:2:1 (A:H:B). The A and B offspring are tested as contrasts in a resistance test.

### Example 2: Functional Validation of the Remorin Gene

[0399] Several variants of transient assays for functional analysis are performed, preferably on leaf tissue. These are based on the transient gene expression of test constructs (for example plasmids, wherein the genes to be tested are under the expression control of a promoter active in plants) and the subsequent measurement of a hypersensitive response (cell death reaction) as a proxy for triggering resistance reactions. For the transfer of the test constructs into plant tissue, for example, a particle bombardment or a local transformation by means of Agrobacterium infiltration is used. Cell death reactions can be measured visually (cell collapse, yellowing, fluorescence under UV light) or by measuring the reporter gene activity of a co-transformed reporter gene (e.g. luciferase). A reduction in reporter gene activity correlates with increased cell death activity.

Assay 1: Comparison of the Cell Death Reaction after Expression of the TGB1 Gene in Two Genotypes Comprising the Resistance Allele of Rz2 (FIG. 4)

[0400] Both genotypes tested contain the resistance allele of Rz2. Genotype 1 contains the functional allele of the remorin, genotype 2 contains the non-functional allele of the remorin. After the transfer of the TGB1 gene of Beet necrotic yellow vein virus (BNYVV) (SEQ ID NOs: 41, 42) or homologous TGB1 genes, for example from Beet soil borne mosaic virus (SEQ ID NO: 43; Wetzel and Varrelmann (2018)) into the two genotypes, a cell death reaction can be measured in genotype 1. In genotype 2, a corresponding cell death reaction does not occur or its expression is significantly reduced compared to genotype 1.

[0401] This test can also be used to screen new genotypes for functional alleles or allele combinations of Rz2 and remorin. It is also potentially suitable for screening genotypes having other genes interfering with the Rz2 mediated BNYVV resistance.

Assay 2: Comparison of the Cell Death Reaction after Expression of the TGB1 Gene and Remorin Genes in Genotypes Comprising the Resistance Allele of Rz2 (FIG. 5)

[0402] A genotype comprising the resistance allele of Rz2 and the functional allele of remorin is used for the assay. In this genotype, TGB1 is transiently expressed in combination with the non-functional allele of remorin. For comparison, transient expression of TGB1 in combination with an empty vector control or transient expression of TGB1 in combination with the functional allele of remorin is performed. In the latter two combinations, cell death triggering can be measured. In comparison, the degree of cell death triggering for the combination of TGB1 and non-functional remorin allele is reduced or absent altogether.

[0403] These results indicate that the non-functional remorin allele is dominant over the functional allele of remorin. Dominant means that even in the heterozygous state (non-functional allele on one chromosome set/functional remorin allele on the other chromosome set), it develops its full effect, i.e. the non-functional allele inhibits or prevents the development of resistance in any case. Conversely, this means that Rz2 can only develop its resistance effect if the functional remorin gene is homozygous.

Assay 3: Comparison of the Cell Death Reaction after Expression of the TGB1 Gene with Combinations of Alleles of Remorin and Rz2 (FIG. 6)

[0404] The transient expression of TGB1, Rz2 and a functional or non-functional allele of remorin can take place in a genotype without Rz2 or in alternative test systems such as Nicotiana species. When functional remorin is used, a higher cell death rate can be measured compared to the use of non-functional remorin.

[0405] The test can also be used in a modified form to compare genotypes with allelic variations of remorin or Rz2. The test construct with the respective gene to be examined is kept out of the transient expression and only the other components are expressed transiently. The expression of the cell death reaction can be used as a measure for the functionality of the variable alleles.

### Example 3: Proof of Interaction Between the Polypeptide Encoded by Rz2 and the Polypeptide Encoded by TGB1 in Nicotiana benthamiana

[0406] To proof the interaction between the polypeptide of Rz2 and the viral polypeptide of TGB1 an infiltration approaches has been chosen. Two leaves per plant have been infiltrated.

### Material

### 1) Constructs

[0407] The Following Constructs have been Provided:

| Construct | Description |
|---|---|
| pZFN-nptII-70S-Rz-2_C48 | contains Rz2 resistance gene |
| FDC173 - pZFN-nptII-70S-TGB1_BNYVV | contains TGB1 gene from |
| | BNYVV |
| pZFN-nptII-70S-Rz-2_C48_D491V | positive control |
| pZFN-nptII-GG4_90-70S_4 | empty vector |

### 2) Plant Material

[0408] As plant material plants of Nicotiana benthamiana at the age of four to five weeks after germination have been provided.

### 3) Infiltration Medium

[0409] 100 ml of infiltration medium have been provided by the following steps: 100 mM MgCl₂ solution has been mixed with 0.5M MES/KOH pH5.6 as well as 0.05M Acetosyringone and subsequently the end volume has been adjusted to 100 ml by adding sterile H₂O.

### Method Steps

[0410] Several cultures of Agrobacterium tumefaciens containing the above listed constructs have been provided. Each culture in LB medium of 3 ml volume. Antibiotics have been added depending on the resistance encoded by the above given constructs selected from the group consisting of: rifampicin, spectinomycin, gentamycin and kanamycin. The incubation took place over night at 28° C. on a shaker at 180 rpm.
[0411] After 18h the OD₆₀₀ value has been determined for each culture. Each liquid culture has been centrifuged for 15 min at 2500 g and room temperature. The pellet has been resuspended in LB medium without antibiotics. The volume has been adjusted to the OD value desired for infiltration: 1.
[0412] After resuspension the culture has been incubated again at 28° C. on a shaker at 180 rpm for 1 h. Afterwards the culture has been centrifuged as described above and the pellet has been resuspended in infiltration medium (composition of this medium is given above). The volume has been adjusted to the OD value desired for infiltration: 1:1 for each of the following combinations: Rz-2_C48+empty vector; Rz-2_C48+BNYVV_TGB1; empty vector+BNYVV_TGB1.
[0413] The bacterial suspension rested for 2h at room temperature. Subsequently, the different bacterial suspensions have been mixed in a relation appropriate for the infiltration: 1:1. The infiltration has been performed via an 1 ml insulin syringe on the underside of the leaf. The infiltration site as well as the infiltrated leaf have been tagged.
[0414] After infiltration the plants have been placed over night at room temperature in darkness. Afterwards, the infiltrated plants have been subjected to incubation in a climate cabinet. During each day 16h of light at 22° C. and 8h of darkness at 19° C. were applied.

### Results

[0415] The results are shown in FIG. 9. While Rz2_C48+empty vector combination and BNYVV_TGB1+empty vector combination do not lead to discoloration of the infiltrated spot, the Rz2_C48+BNYVV_TGB1 combination leads to a discoloration of the infiltrated spot due to necrosis. The necrosis show that the plant defense mechanism has been activated due the triggering of an resistance reaction.

### Example 4: Proof of Interaction Between the Polypeptide Encoded by Rz2 and the Polypeptide Encoded by TGB1 in Sugar Beet

[0416] Leaf discs of the sugar beet variety Danicia have been transiently transformed via particle bombardment with different construct combinations. Afterwards the activity of the reporter protein luciferase has been determined in the protein extract. It could be shown that the combination of Rz2_C48 with BNYVV_TGB1 triggers an immune response which comes along with cell death and a reduced activity of the luciferase reporter protein. The transformation of Rz2_C48 alone or the transformation of BNYVV-TGB1 alone did not show such a reaction which is to be interpreted that such a single component is not sufficient for triggering an immune response. However, the combination of both factors allows interaction and initiates a resistance reaction. The results are shown in FIG. 10.

### Example 5: Proof of Protein Interaction Between BNYVV_TGB1 and g23238_Remorin

[0417] Plasmids for bimolecular fluorescence complementation (BiFC) have been provided. These plasmids encoded protein fusions with split parts of the Venus fluorescence protein. We were able to observe fluorescence signals after coexpression of BNYVV-TGB1 constructs in combination with constructs comprising an allele encoding the functional variant of remorin in Nicotiana benthamiana. This fluorescence signal was not observed after expression of any of the two individual constructs. The resulting data proof the chemical interaction between the functional variant of remorin and the viral protein TGB1.

[0418] This experiment indicates a protein-protein interaction between g23238_Remorin and BNYVV_TGB1, the viral protein that activates Rz2_C48 resistance. This result is supporting data for the involvement of g23238_Remorin in the BNYVV_TGB1 detection by Rz2_C48.

The application's sequence listing, which the Patent Office published only in electronic form, follows.

SEQUENCE LISTING (55 sequences)

SEQ ID NO: 1 - DNA, 9105 bp, Beta vulgaris
atagatgacgtggtttaacttttgtactatttacactcactcctttgatcatgttttatgatttttacgtttgaaaaatatatttatgtcggatattattagattcatcttgatatatattttcaaaatattaactttttataattattatatgtagggagttagatatattaatagttaagtttctgcgttggcaagtgcgtccggaattgtgtctcaagtatgttgaaacgaaggaagtatatatgtcattacaaaggtcacgatgtataaaaaagtgattgcatttacatatgggtcactatgtgttccacgtacaatatttgacatgcataaccttttaatccacaataacattattacaatttgcaaaccaggtcaacataaatcttactctaaactattaaacatggggaaaatcaagtaattaacatattccttttaacttcaccccaaaagataaacatttttcttagtggtcgtttggtaaatacgaaattatgtaggcaatagaaattcccatgattttcatatttgtgtagttgtttagttgacagatagtgaggaaaacgggggcaatgcaaattcatgagaatttgaaattcccacaaaatatacgaatttatttacctactcttcccttggtcactcacaactgctacataaattcttatgaattacaactttcctactaccaaacaatttaaactaatttataggaatttcataaaggaattaattttctacaaattgtaaattcctatagaaatttaattcccattgcaaccaaacaaacactaacactccgagagaaccaacaatccaactcccgatcctaaaaccataactacaagctatttttactactctattccttttaatataatcatgattcattatcactagcctttacaaattacaatattagtaacagtggattattttccaataaaaaagaatgattaatgtgtgattttgttataagttcttaaaactaatatggtttatgctcgtgtgcaatcattatcctatttttgcaacaaaatgctaagagcttttgggttcaatggtatcacttcctattttctatatggaaaattaaggatcaaaatttggtggaagcataatttcaatgttgtctggggtggggattgggtagaggtgatcattttggcccggcccgtttttgggccgggttttgggcagaatttttcggcccgcgggccgggccgggccgggcccgccccggtcgtttttttttttgtttttgggcgggctttgggcaagctaaaaacgactttttagtctattttttggcccggcccgttttggcccgcaaaagcccgctaagcccgacccgaaatagcgggctttggacacaaaaattcggtccgaatttaggcctggcccggccaatgggcaaatttttttggccgcggcccggcccatgatcacctctaggattcgggtacttgttggacatctgggtgagagtcttgtgcaagaacaacccaaaagtaaattcttcttaccatgtggtttccgaaaggaggcccaaaaaaatcaacaaaataacaaaaaacaaagatcaatgacaactactttttatttttggtgtaaaggaggatcaacgtaataatcttgtcgagtttgatcccaagtcttaactcttaagtattattccacgagatattactaactaggactgttctctaattctcttcaccattaaaaaaaaaatccgagccaaataagttcaaataatatctaactaaaactaatacaatacttaaaaataagtttcgataaaattgaatcaggtctaattaattcaattcaaataagttcggattttttgagatgaaaacaacgctaccttggcatccacaagaatgacaactatgaaaaggtcattttggctctattatttttggtttgattgcttgcaccaactctcaactctcaactctctagtctctcctcgttcttattcattccagctaatgaagctgctatcgttatcataaacttccctctaactcctttctaacttcccttccactactcttcttcattttctctctcctccctcctttcttttcttcctcttttttctaggaacttcacaattaaaaaaacttaaatatacttggaagtacttttgattgtaatacatatggcaacagaggaagcaaataaagtggtgactgaaacaccggcaccaccggtaactccgccacaagaaccagcagcaacagtttcggaaacccgggaatcaccggttgcagtggaagagaaaagtttagtccctgtatcaacccctcttccttccaccactgaaaaaactcctgcttcggttgaaagttagttaacaattttttttttaatcatctatgattttaattattattatatgatgatcattatattatagtatatggctaattttgctttattcaagaatatttagtgatttaagggcttttagaataattagtgaaatttagttagttttttcccctgtgatataaagatgggtcatgggtggtagttttctgttttccaattatatatttttactatttttggtggatgggtgtttttatttttccttaatttggtattttttctgcatattatccatgtttgttaaggagattacttgcttattttaagaatatcatgagtgttatttgggaatattagggacttatcttagggctttttctggatcatgaggtttgaagtaaagtggttgggcacttttatagtatattcaaaactatttttttcgcttattgctcatttaaacgatttcaaatgagcaaataacaactataattgaagaaattagcctaagctcatggtatgcctgagtgtatggtgtataatttgattatcttagactttcttgtgcgttgcgcagtgattaaagagtaaaggcaattccagctaattttggttatactaagcttttttactgctaattgatcctttgttactttgtcctttgatgataaacctatgtaagcaaagtgcactattcatgaatcatgatactggcctggccattagctattatctatgttacttagacacacggattgggtgtctactcggatgtgggtgtccaagtgtctgactcggctattttggaaaaaagtcagtttccggtttaaaatgaagtatacaagtaaagtgtcgtgttggacacgacacgatacgacaccccgtttttgaggtaaatgaaggtgtcggagtaacacaagctattatcattcatcaaacagaaattagaagctattacatctttaactatacttggacaaccacctagctatacacgagtcgggaactcaattagagtaaggtgagccatatgagccgctaagttggctgtctataatcatgaataaacctaactaaattaaaagaactagtaagagatcaggtatccttaacaaccattcctgcataagattcgtcacacttattttcattaatcatctttactacctgcagtcaatcactttcaattataatatcccacgcatagcattggatagccattttcattccgagcactatagccttcccttccgtcacattcgtttccctcaagtgtttcactttttgacacgccatacgaatgatatgcccaccatgatcttgtattctttttacaattcccattccgattcccacctccttaaagatcgcagcatctacattgatttccagcacattatagcttggacagcaccacaccatgatagaacgctgcccaccagtctgatctgcagcaggcagactcatgtgtctgctgtccttcccctctgtacgagccagttcaaaggcagatggagctgtacacagtcctgtagggtgacgggcaatgctgccatgataaacattgttccgtttattccaaatcatccatgctattattgcaactttacaacgctcctcctatataacatccatccaccatgcagcccagtcactagcacatcattgggattctagaatactctccaacccgcttcttcccacaggaatacagggtagttctaactcaacgcaagggtgtttgttacataaatctttataattcttgcatagcatttccttatgtaaatgaacatgctcaaaatgttttattaaactattttgtttgacatataatagaatttcccttgaagtaccagtgatgatttgcacagtatcagcaggagcacaaaagttgcaaaagcttagctatgatgatgctataaacttaagagtatatactaggttattatttataaactaaacttgagtcttaaggagggttgaacttggaattttaagctcaaggacactcgagctcaaattactacaaggcacaagctgagttgagatatcccaagtttaagctgtctttaacacccctacctatgcacgactgttgctgtatactgttttcttggtttataaggagcctagagggcaatgatgcacatggtttgaaactttgttcttgtgttccagtgtatcactacattaaaaaatttcatctgagctagccgatgtatgctcattatatcctgtaataaatacagttatcacttacttttttctatctgaggttggtttgctagattatgactttggactctcagtatcgcaatatacgtataaatgaaatcaaagactcatttttatctcataattttctctttaaatttgtattttcattcagcgtgtgttacattggcttaaaatttaaaataattcactttttattgacctcttctttgattcacttttattaactagtaaactgtatctgatggacagaggttacagaattatctgaagaaaagactctagaggaaaagcccatagaggagaagcctttagagggctcagttggtagaggtaatagtttcactcatcttgttgtaaacgagcttagtaagtttgatttcagcttatatctcattgttgttgtattcagatgctcagctagcacgagttcaaactgagaagaggatttcactgatcaaagcatgggaagaaagtgaaaaatgcaaggccgaaaacaagtaagagtactttgtatggatatgattagatattagtgctacacccacaggctatacaaatatatattattatgtcatttagagatcacatactcaaaatagcaatgggaatcttaagggtgcttgaaccatgactgaattatttggcttaagttgttttttggtgctaaagaatacgagactcctactcctagcaagaaaagaagaatctaataagtcttaactccacaattgcaaggtcgttaacaatagaagaactcttgtgacttaattttagttaaccaagcgataggtaggcctcatgccaagttacaagatttttcacacatacgcgtgatatatatagctgtctagcttgctctgagcctctgaacaataagcttggcgaggttcttaagtggtttgtcacattgctcgtaccaaccagtatcactcttgtcacctgtcagtgcatcaattaggtctccctatatacttgctggacctgtgataaccattctacactctgtatcaattatttgtattatacttgaataggtctaaaggccaacatttgggttagtctctaaaagttgctggagtaaatttgtgcctatagttgaatggttctgtgcttaaaccttccctttgaatattgctaagagttcagtctgtggcacatcacatcggccatatatttagctgagtttagtgctgatacaattgcttaaccgctccttcccctacccttcagcaactcttggactgcctcctcctctgcatcagtgaatgtatgttgaatagtttagtcctttccatcattccatgcctcctttaaccctcatccactctaaccaaaaacaaaatcaaatttgttatgtgattttgatggttgagaatttgagatacaaaatagccttttgcctcctttaccataacaaccaccgtattgtcaatttgttatagacccatatcgctcattagcctatatgggaaagtcttagatcaatttactcattctgtttccttttgttcttgctccaaatatgtagggagatacaaaagaaagtgggtaatagagaaggagtaagtgcatataatgatataattataagcaaggcatgtttggcatctatctagaatctggttttgggttttaagatttttcaagtcatatgatatgaaatgtatgatggacttaaaataagtcatattcaaagtaatcatgtctatatcgaaatctgacaacagaactcgaaaatattttttctggttctgacatttctatttaattggaaacacaaatgataacgaagagacacactgttgatagaccctttaatttgatggaagttacaaaacaaatttacttacttaatgaactgcgcagggcacacaagaaaattgctgctatcgaggcatgggagaacagcaagaaagcatctcttgaggcagagctgaaaaagatcgaggtatagtgccattaaacaactatctttatctcgagttattttcgaacaatagaagttagtttaactgatgaggccagcttacatgaatgcaggaaagcttggaaaaaaagaaggcagaatatgcagaaaaaatgaagaacaaagtggctatgactcacaaggaagcagaggagaagaaggctacggttgaagccaaacgtgctgaagatattctgaaagcggaagagatggctgctaagtatcgcgccactggaaagccccccaagaaacttcttggtttgttctaataaggactatgtgaattcagtaattacttctataaatgtttgatgtgattaacaattaagcaagtcaattagtttgtgaaaaggaaattatagataagttatttgtatttttttcccatttgtataattgttttatggctttattggtttggtaagtgtgtatagtttgggtagaacgatttaagaattggtgcacatttgtttctatgtggatattgtttctgttatgtaagtaaattggatattgtttctgttatgtaagtaaattggatattggaccacaacttgtgtctgatgtctatcatttcctattgtcttgtcagtcgtttgcaaattcgcaaatacaaaggtttaacggaaacctgttctcctctgaacagatagttggaatcgtgtgatgcccactccaagtgcatatactaaagtcccgctcggagaacagttgtccaaatatcctaaactagctgaaaattatcctagatatgaattaaactttagagcctccaaagttatcacgttatgttatatatgtacgtagaagaattcatccgctcctgttagtgttcagctaataaatcagtaagctgttagttctgcataatgtaccagtactactacaaggattacttaagactgttttcttactaatgaggtctaatatgtgacaaagattgtcaagattatgtaaatcatgcctgttagtataaaacaagctgcactgactaattttattcactggttggagaatcgagcaacatgttcattgctgtatctgaagtgtcacctgatgcaacagaccctgagtctgtcctctgctgctgctctgttttgacacctacgtgttgcggaacttggcctgttacccctgaacaagcctctgaggaaggtgaaacacgatcgattttcaagggccgcgcattttggatcttcctaaaggactctccgacctcggaattccacatagaaaagaagtgatcagagttggttctggaatatcctgaggggttgtagagggattctaatgacaatcgagcctcggtctccaatcggatactttcccattggaccatatgacgggttgtatgtgactttgatggtgtagtttctgggtaaacgttgatggtttttcgtttcctcaagtggctgttccagtggttcttgacatcattgtctgttcttcctggtagccttgctgctatagcagcccacctgtaaaaatagcatgcataatacttaggacagctaacctttgttttatcaaccacgtaatttctggatttgaggtatcttgctaccttgcatacaagaaatgataaacatttatacaatggatgcatctagcaaagtgtctgtgatatagtgtttgtgttgtttttctctccttttgctacttcacaaacgcataaaagacaattgacggaagagttataccttttatagtctaaacgagtttttatctttaaaactaatatgacaacgggaaaagtatcatttaagtctttaagataataaagtactagttgtcttctctccttttattaagcacttggtattattatatatgcacaatataatgagatttagcgtaaaagttgtcactttttttaattggcgatgactataattttaataaaatatttcatagtttaggtaagagattatgaaatgataaaaagtttcctaactatttctaaagagtatatttttcatgtgatatatggtatttgtaatcacataattagggataataaaacaattagaaaaatacctattgccaaggagtccatgaagttgaataacagtctcgttttcctcttcagagaaaggacctcgtctaatgtcaggtcttaaataattggtccatcgaagacggcaactctttccacatcgagatatacctaacatataacatcaatatgaaattttatcacataaattaacacatagaagtattatattcaatttttcatgaatgacatattcaagcttaatgagttaattcaccttattggaagtatagtcatatacataatcaagacaacctttctactttataggtagcaagtaaattgtaggactttgaggtgggctgggttaggtccaagcaagaagaaagtacttccgaaaaactgctaaagtatttttctgtaagaattactacacaagaagcaccagtggtctagtggtagaatagtaccctgccacggtacagacccgggttcgattcccggctggtgcataaaatatcagagctgtgatgataatattgcgcctctatgt

SEQ ID NO: 2 - DNA, 4649 bp, Beta vulgaris
atggcaacagaggaagcaaataaagtggtgactgaaacaccggcaccaccggtaactccgccacaagaaccagcagcaacagtttcggaaacccgggaatcaccggttgcagtggaagagaaaagtttagtccctgtatcaacccctcttccttccaccactgaaaaaactcctgcttcggttgaaagttagttaacaattttttttttaatcatctatgattttaattattattatatgatgatcattatattatagtatatggctaattttgctttattcaagaatatttagtgatttaagggcttttagaataattagtgaaatttagttagttttttcccctgtgatataaagatgggtcatgggtggtagttttctgttttccaattatatatttttactatttttggtggatgggtgtttttatttttccttaatttggtattttttctgcatattatccatgtttgttaaggagattacttgcttattttaagaatatcatgagtgttatttgggaatattagggacttatcttagggctttttctggatcatgaggtttgaagtaaagtggttgggcacttttatagtatattcaaaactatttttttcgcttattgctcatttaaacgatttcaaatgagcaaataacaactataattgaagaaattagcctaagctcatggtatgcctgagtgtatggtgtataatttgattatcttagactttcttgtgcgttgcgcagtgattaaagagtaaaggcaattccagctaattttggttatactaagcttttttactgctaattgatcctttgttactttgtcctttgatgataaacctatgtaagcaaagtgcactattcatgaatcatgatactggcctggccattagctattatctatgttacttagacacacggattgggtgtctactcggatgtgggtgtccaagtgtctgactcggctattttggaaaaaagtcagtttccggtttaaaatgaagtatacaagtaaagtgtcgtgttggacacgacacgatacgacaccccgtttttgaggtaaatgaaggtgtcggagtaacacaagctattatcattcatcaaacagaaattagaagctattacatctttaactatacttggacaaccacctagctatacacgagtcgggaactcaattagagtaaggtgagccatatgagccgctaagttggctgtctataatcatgaataaacctaactaaattaaaagaactagtaagagatcaggtatccttaacaaccattcctgcataagattcgtcacacttattttcattaatcatctttactacctgcagtcaatcactttcaattataatatcccacgcatagcattggatagccattttcattccgagcactatagccttcccttccgtcacattcgtttccctcaagtgtttcactttttgacacgccatacgaatgatatgcccaccatgatcttgtattctttttacaattcccattccgattcccacctccttaaagatcgcagcatctacattgatttccagcacattatagcttggacagcaccacaccatgatagaacgctgcccaccagtctgatctgcagcaggcagactcatgtgtctgctgtccttcccctctgtacgagccagttcaaaggcagatggagctgtacacagtcctgtagggtgacgggcaatgctgccatgataaacattgttccgtttattccaaatcatccatgctattattgcaactttacaacgctcctcctatataacatccatccaccatgcagcccagtcactagcacatcattgggattctagaatactctccaacccgcttcttcccacaggaatacagggtagttctaactcaacgcaagggtgtttgttacataaatctttataattcttgcatagcatttccttatgtaaatgaacatgctcaaaatgttttattaaactattttgtttgacatataatagaatttcccttgaagtaccagtgatgatttgcacagtatcagcaggagcacaaaagttgcaaaagcttagctatgatgatgctataaacttaagagtatatactaggttattatttataaactaaacttgagtcttaaggagggttgaacttggaattttaagctcaaggacactcgagctcaaattactacaaggcacaagctgagttgagatatcccaagtttaagctgtctttaacacccctacctatgcacgactgttgctgtatactgttttcttggtttataaggagcctagagggcaatgatgcacatggtttgaaactttgttcttgtgttccagtgtatcactacattaaaaaatttcatctgagctagccgatgtatgctcattatatcctgtaataaatacagttatcacttacttttttctatctgaggttggtttgctagattatgactttggactctcagtatcgcaatatacgtataaatgaaatcaaagactcatttttatctcataattttctctttaaatttgtattttcattcagcgtgtgttacattggcttaaaatttaaaataattcactttttattgacctcttctttgattcacttttattaactagtaaactgtatctgatggacagaggttacagaattatctgaagaaaagactctagaggaaaagcccatagaggagaagcctttagagggctcagttggtagaggtaatagtttcactcatcttgttgtaaacgagcttagtaagtttgatttcagcttatatctcattgttgttgtattcagatgctcagctagcacgagttcaaactgagaagaggatttcactgatcaaagcatgggaagaaagtgaaaaatgcaaggccgaaaacaagtaagagtactttgtatggatatgattagatattagtgctacacccacaggctatacaaatatatattattatgtcatttagagatcacatactcaaaatagcaatgggaatcttaagggtgcttgaaccatgactgaattatttggcttaagttgttttttggtgctaaagaatacgagactcctactcctagcaagaaaagaagaatctaataagtcttaactccacaattgcaaggtcgttaacaatagaagaactcttgtgacttaattttagttaaccaagcgataggtaggcctcatgccaagttacaagatttttcacacatacgcgtgatatatatagctgtctagcttgctctgagcctctgaacaataagcttggcgaggttcttaagtggtttgtcacattgctcgtaccaaccagtatcactcttgtcacctgtcagtgcatcaattaggtctccctatatacttgctggacctgtgataaccattctacactctgtatcaattatttgtattatacttgaataggtctaaaggccaacatttgggttagtctctaaaagttgctggagtaaatttgtgcctatagttgaatggttctgtgcttaaaccttccctttgaatattgctaagagttcagtctgtggcacatcacatcggccatatatttagctgagtttagtgctgatacaattgcttaaccgctccttcccctacccttcagcaactcttggactgcctcctcctctgcatcagtgaatgtatgttgaatagtttagtcctttccatcattccatgcctcctttaaccctcatccactctaaccaaaaacaaaatcaaatttgttatgtgattttgatggttgagaatttgagatacaaaatagccttttgcctcctttaccataacaaccaccgtattgtcaatttgttatagacccatatcgctcattagcctatatgggaaagtcttagatcaatttactcattctgtttccttttgttcttgctccaaatatgtagggagatacaaaagaaagtgggtaatagagaaggagtaagtgcatataatgatataattataagcaaggcatgtttggcatctatctagaatctggttttgggttttaagatttttcaagtcatatgatatgaaatgtatgatggacttaaaataagtcatattcaaagtaatcatgtctatatcgaaatctgacaacagaactcgaaaatattttttctggttctgacatttctatttaattggaaacacaaatgataacgaagagacacactgttgatagaccctttaatttgatggaagttacaaaacaaatttacttacttaatgaactgcgcagggcacacaagaaaattgctgctatcgaggcatgggagaacagcaagaaagcatctcttgaggcagagctgaaaaagatcgaggtatagtgccattaaacaactatctttatctcgagttattttcgaacaatagaagttagtttaactgatgaggccagcttacatgaatgcaggaaagcttggaaaaaaagaaggcagaatatgcagaaaaaatgaagaacaaagtggctatgactcacaaggaagcagaggagaagaaggctacggttgaagccaaacgtgctgaagatattctgaaagcggaagagatggctgctaagtatcgcgccactggaaagccccccaagaaacttcttggtttgttctaa

SEQ ID NO: 3 - DNA, 633 bp, Artificial Sequence
  cDNA of remorin gene - haplotype 1
atggcaacagaggaagcaaataaagtggtgactgaaacaccggcaccaccggtaactccgccacaagaaccagcagcaacagtttcggaaacccgggaatcaccggttgcagtggaagagaaaagtttagtccctgtatcaacccctcttccttccaccactgaaaaaactcctgcttcggttgaaaaggttacagaattatctgaagaaaagactctagaggaaaagcccatagaggagaagcctttagagggctcagttggtagagatgctcagctagcacgagttcaaactgagaagaggatttcactgatcaaagcatgggaagaaagtgaaaaatgcaaggccgaaaacaaggcacacaagaaaattgctgctatcgaggcatgggagaacagcaagaaagcatctcttgaggcagagctgaaaaagatcgaggaaagcttggaaaaaaagaaggcagaatatgcagaaaaaatgaagaacaaagtggctatgactcacaaggaagcagaggagaagaaggctacggttgaagccaaacgtgctgaagatattctgaaagcggaagagatggctgctaagtatcgcgccactggaaagccccccaagaaacttcttggtttgttctaa

SEQ ID NO: 4 - protein, 210 aa, Beta vulgaris
MATEEANKVVTETPAPPVTPPQEPAATVSETRESPVAVEEKSLVPVSTPLPSTTEKTPASVEKVTELSEEKTLEEKPIEEKPLEGSVGRDAQLARVQTEKRISLIKAWEESEKCKAENKAHKKIAAIEAWENSKKASLEAELKKIEESLEKKKAEYAEKMKNKVAMTHKEAEEKKATVEAKRAEDILKAEEMAAKYRATGKPPKKLLGLF

SEQ ID NO: 5 - DNA, 9944 bp, Beta vulgaris
atagatgacgtggtttaacttttgtactatttacactcactcctttgatcatgttttatgatttttacgtttgaaaaatatatttatgtcggatattattagattcatcttgatatatattttcaaaatattaactttttataattattatatgtagggagttagatatattaatagttaagtttctgcgttggcatgtgcgtccggaattgtgtctcaagtatgttgaaacgaaggaagtatatatgtcattacaaaggtcgcgatgtataaaaaagtgattgcatttacatatgggtcactatgtgttccacgtacaatatttgacatgcataaccttttaatccacaataacattattacaatttgcaaaccaggtcaacataaatcttactctaaactattaaacatggggaaaatcaagtaattaacatattccttttaacttcaccccaaaagataaacatttttcttagtggtcgtttggtaaataggaaattatgtaggcaatagaaattcccatgattttcatatttgtgtagttgtttagttgacagaaagtgaggaaaacaggggcaatgcaaattcatgagaatttgaaattcccacaaaatatacgaatttatttacctactcttcccttggtcactcacaattgctacataaattcttatgaattacaactttcctactaccaaacaatttaaactaatttataggaatttcataaaggaattaattttctacaaattgtaaattcctatagaaatttaattcccattgcaaccaaacaaacactaacacttcgagagaaccaacaatccaactcccgatcctaaaaccataactacaagctatttttactactctattccttttaatataatcatgattcattatcactagcctttacaaattacaatattagtaacagtggattattttccaataaaaaagaatgattaatgtgtgattttgttataagttcttaaaactaatatggtttatgctcgtgtgcaatcattatcctatttttgcaacaaaatgctaagagcttttgggttcaatggtatcacttcctattttctatatggaaaattaaggatcaaaatttggtggaagcatagtttcaatgttgtctggggtggggattggggtacttcttggacatctgggtgagagtcttgtgcaagaacaacccagaggtaaattcttcttaccatgtgatttccaaaaggaggtccaaaaaaatcaacaaaataacaaaaaaacaaagatcaatgacaactactttttatttttggtgtaaaggaggatcaacgtaataatcttgtcgagttcgatcccaagtcttaactcttaagtattattccacgagatattactaactaggattgttctctacttctctccaccattaaaaaaaaaaattcgagtccaataagttcaaataatatctaactaaaactaatataatatttaaaaataagtttcaataagaatcaatcaggtctaattaattcaattcaaataagttcggattttttttgagatgaaaacaacaataccttgacatccacaagaatgacaagtatgaaaaggtcattttggctctattatttttggtttgattgcttgcaccaactctcaactctctctctagtctctcctcgttcttattcattccagctaatgaagctgctatcgttatcataaacttccctctaactcctttctaacttcccttccactactcctcttcattttctctctcctccctcctttcttttcttcctcttttttctaggaacttcacaataaaaaaaacttaaatatacttggaagtacttttgattgtaatacatatggcaacagaggaagcaaataaagtggtgactgaaacaccggcaccaccggtaactccgccgcaagaaccgccagcaacagtttcagaaacccgggaatcaccggttgcggtggaagagaaaagtttagtccctgtatcaacccctcttccttccaccactgaaaaaactcctgcttcggttgaaagttagttaacaatttatttttgtagtatatactttacttatctataattttaattattatatgatgatcattatattatagtatatggctaattttgctttattcaagaatatttagtgatttaagggcttttaattttattaaacttttctcaattcccctgttctttttaatcattacttgaagtttaggtagagttcgtttggttcacctcaaattctattggaattcggattttttaggaagtacaaaataggatagttgttttgtatgcacgaattagggaattcatggtaaacagaatttccaaggaaatggaaattctgatgtataggaaattaatcacaacctcttagtaatttgaaattcctatgtcaattacaaatttatatgctcaaccaaataccaaaaattattttctcggatatagacaagagaatttacttcttatgaaatcagacttcccatgagaattaagtttcaacggtaaccaaacgagtttttagttttttcccatgtgatataaagatgggtcatgggtggtagttttccaattatatatttttactatttttggtggatgggtgttcttatttttccttaatttgttatttatttctgcttattatccatgtttgttaaggagattacttgcttattttaagaatatcatgagtgttatttgggaataatagggacttatctgagggctttttctggatcatgaggtttgaagtaaagtggttgggcaactttatatcctttaacttgggcacttttatagtatattcaaaactattttttcgctcattgctcatttaaatgatttcaaatgagcaaattaacaactataattgaagaaattagcctaagctcatggtacgcctgaatgtatggtgtagattttgattatcttagactttcttgtgcgttacacagtgattaaagagtaaaggcaaagtgctaattttggttatactaagtttttaatactatttgatcctttgttactttgtcctttgatgataaaacctatgtaagcaaagtgcactattcatgaatcatgatactggccattagctattatctatgttacttagacacacagattggatgtctactcggatgtgggtgtccaaagtgtctgattcggctattttggaaaaaagtctaagtttccggtttaaaatgaagcatacaattaaagtgtcatgtcagacacgacacgacacgacaccccgtttttgaggtaaatgaaggtgtcggattaacacaggctattatcattcatcaaacagaaattagaagctattacatctttaactatacttggacaaccacctagctatacacgagtcgggaactcaattagagtaaggtgagccatatgagccgctaagttggctgtctataatcatgaataaacgtaactaaattaaaagaactagtaagagatcaggtatccttaacaaccatatctgcataagattcatcacacttgttttcattaatcatctttactacctgcaggcaattactttcaattataatatcccacgcatagcattgggtagccattttcattccgagcactatagccttcccttctgtcacattcgtttcccacaagtgtttcactttttgacacgccatatgaatgatatgcccaccatgatctcgtataacaattcccattccgattcccacctccttaaagatcgcagcgtctacattgattttcagcacattatagcttggacagcaccacaccacactagagtgctgcccaccagtctgatctgcagcaggcagactcatgtgtatgctgtccttcccctctgtaccagccagttcaaaggcagctggtgctgtacacagttctggaaggtgacgggcaatgctgccatgataaacattgttccgttcattccaaatcatccatgccagtattgcaactttacaactctcctcctataaaacatccatccaccatgcaacccagtcactagcgcatcatattgggattccagaatactctccaacccgcctcttcccaaaggatactgggtatttcttaatcactatttctaaatcaacgcaagggtgtttgttacataaatctttacaattcttgcatagcatttccttatgtaaatgaacatgctcaaaatgttttatcaaactatttttgttaaacatataatagaatttcccttgaagtaccagtgatgtgcacagtatcagcgggagctcaaaagttgcaaaagcttagctatgatgatgctataaacttaagagtatatatcaggttattatttataaactaaagttgagtcttaaggtgggttgaacttggaattttgtgctcaaagacactcgagctcaaattactacaaggcacaagctgagttgtgatatcccaagtttaagctgtctttaacacccctacctataacctatgcacgactgttgctatttactgttttcttggttcataaggagcctagagggcaatgatgcacatggttggaaactttgttcttgtgtttcagtgtatcactacattagaaaattttcatccgagctagccaatgtatgctcattatatcttgtaataaatacagctatcacttacttttttctatctgaggttgtttgctagattatgactttggactagcagtatcgcaaaatgcgtataaatgaaatcaaagactcatttttatctcataattttctctttaaatttgtattttcattcagcgtgtgttaattggcttcaaatttaaaattattcactttttattgacctcttttttttagaggattcacttttattaactagtacactgtatctgatggacagaggttacagaattatctgaagaaaagcctctagaggaaaagcctatagaggagaagcctttagagggctcagttggtagaggtaatagtttcactcatcttgttgtaaacgagcttaataagttcagtttcagcttatatcttattgttgttgtattcagatgctcagctagcacgagttcaaactgagaagagaatttcactgatcaaagcatgggaagaaagtgaaaaatgcaaggccgaaaacaagtaagagtactttgtatggatatgattagatattagtactacacccacaggctatacaaatatacattatcatgtcatttagagatcacatactcaaaatagcaatgggaatctcaggggtgcttgaaccatgagtgaattatttggctaaagttgttttttggtgctaaagaatatgagactcctagcaagaaaagaagaatctaataagtcttaactccaccattgcaaggtcgttaacaatagaaaaactcttgtgacttaatttaagttaaccaagcgataggtaggcctcatgccaagttacaagatttttcacacatacgcgtgacaaatatagctgtctagcttgctcttaacaataagcttggcgaggttcttaagtggtttgtcacattgctcgtaccaaccagtatcactcttgtcacctgtcaatgcatcaattagctctccctatatacttgctggacctgggataaccattatatactctgtattaattctttgtattatacttgaataggtctaaaggccaacatttgggttagtctctagaagttgctggagtaaatttgtgcctatagttgaatggttccgtgctttaaccttccctttgaatatcgctaagagttcagtctttggagcatcacatcgaccatatatttagctgactaagcgctgatacaattgcttaagcgctccttcccctactgtttagcaactcttggactgcctcatcctttgcatcagtgaacgtatgttgagtagtttaatcctttccatcattccatgactcctttaaccctcatccactctagccaaaaacaaaatcaaatttgttgtgtgattttgatggttgagaatttgagatacaaaatagccttttgcctcctttaccataaccaccgtattgtcaatttgttataagacccatatgactcattagcctatatgggaaagtcttagatcaatttactcattctgtttccatttgttcttgcttcaaattagaggtggttattggacagggtagtccaatggttaaagggttagggtcaattttacagggcttttattggtcagggttttattggacagggttattattggatagggtcattatagggtcaacaaagaaacccaataattttataaaataaaattagttttgtaaaaacaattacatattcggattcgcattcatttatacttacttttggctcttcttgttccttgtttttcttgctcgtttaccgacccacccattatcgacccgctataagccctctacccatttggcccgacctgctaccgaccctttatgaggcgaccctcttatgacccaaacccgcttccgacccgtactgaccctgacccgacccgtccaataaccaggtctacttcaaatatgtaggaagatacaaaagaaagtgggtaataaagaagaaagagtaagcgcatataatgatataattataagcaaggcatgtttggcatctatctagaatctggttttgggttttaagatttttcaagtcatatgatgtgaaatgtatgatggacttaaattaagccatattcaaagtaatcatgtctatatcgaaatctgacaacagaactcgaaaatattttttctggtttggacatttctatttaattggaaacacaaatgataacgaagagacactctattgatagaccctttaatttgatggaagttacacaaatttacttgctaaaaattgcgcagggcacacaagaaaattgctgctatcgaggcatgggagaacagcaagaaagcatctcttgaggcagagctgaaaaagatcgaggtatagtgccattaaacagctatctttatctcaagttattttcgaacaatagaagtttgttgagctgatgaggccagcttacatgagtgcaggaaagcttggaaaaaaagaaggcagaatatgcagaaaaaatgaagaacaaagtggctatgactcacaaggaagcagaggagaagaaggctacggttgaagccaaacgtgctgaagatgttctgaaagcggaagagatggctgctaagtatcgcgccactggaaagccccccaagaaacttcttggtttgttctaataaggattatgtgaatttagtaattacttctataaatgtttgatgtgattaacaattaagcaagtcaattagtttgtgataaggaaattatagataagttatttgtatttttttttccatttgtataattgttttatggctttattggtttggtaggtgtgtatagtttgggtagaacgatttaagaattggtgcacatttgtttccatgtggatattgtttctgttatgtaagtaaattggatattgtttctattatgtaagtaaattggatattggaccacaacttgtgtctgatgtctatcatttcctattgtcttatcagtcgtttgcaaattcgcaaatacaaaggtttaacgggaaacctgttctcctctaaacagatagctggaatcgtgtgatgcccactccaagtgcatatactaaagttcccctcggagaacagttgtccaaatgtcctaaattaggcgaaaagttatcacgttatgttatatatgtacgtaggagaattcatccgctcctgttagtgttcagctaataaatcagtaagctgttagttctgcataatgtaccagtactactacaaggattacttaagactgttttcttactaatgaggtctaatatgtgacaaagattgtcaagattatgtaaatcatgcctgttagtataaaacaaactgcactgactaattttattcactggttggagaatcgagcaacatgttcattgctgtatctgaagtgtcacctgatgcaacagaccctgagtctgtcctctgctgctgctctgttttgacacctacgtgttgcggaacttggcctgttacccctgaacaagcctctgaggaaggtgaaacacgatcgattttcaagggccgcgcattttggatcttcctaaaggactctccgacctcggaattccacatagaaaagaagtgatcagagttggttctggaatatcctgaggggttgtagagggattctaatgacaatcgagcctcggtctccaatcggatactttcccattggaccatatgacgggttgtatgtgactttgatggtgtagtttctgggtaaacgttgatggtttttcgtttcttcaagtggctgttccagtggttcttgacatcattgtctgttcttcctggtagccttgctgctatagcagcccacctgtaaaaatagcatgcataatacttagaatagctaacctctgttttatcaaccacggaatttctagatttgagtagaggcgatcatggaccgggttcgggccgggcttggaagttgcccattggttgggccggggcaaaattttatgtcgaaagccggctatttcgggccaaagtgagcggcttttcagcccaaaatcgggtctggccgaaaaatagactaaaaagtcatttttggcttgtccaaagcctgttcaaagaaaaaaaaattggcccggaccgggcccgacagtggccaaaaaattctgcacaaaacccgcacaaaaagcgggccgggtcaaaatgatcatgctctagatttgaggtatcttgctaccttgcatacaagaaatgataaatatctatacaatggatgcatctagcaaagtgtgtatataaatagtatttgtcatatagtatttgtgttgtttttctctccttttgctactttacaaacatataaaaaataatgacggcacaggcgaagttaggcttgattgtggaggggagctaattttcttcaaagctatgttggggcctgtaagggccatgattcttttaggccctaacatagcctcgttagttgccagtttggttgattggagagttatactctttttgtagtctaagctagcttttatctttaaaactaatttgacaacgagaaaagtatcattttaagtctttgagataacaaagtattagttgtcttctcttcttttataaaccttgggtagtattatatatgcacaatagaataagattcagtgtaaaagttgtcaccttttctaatagaatagtggcaatgactataactttttaaaaatacttcataatataggtaagagactatgaaatgataaaaattgcctaactatttctaacaaatatattttttatgtgatatatggtattcataatcacataattagggataataaacaataagcataataaacatagcattagaggagtaataacgtacctattgccaaggaggccatgaagttgaataacaatcttgttttcctcttcggagaaaggacctcgtctaatgtcaggtcttaaataattggtccatcgaagacgacaactctttccacatcgagatatacctaacatataatcataacataaaattttatcacataaattaacacatagaagtaatattttcaatttttcatgaaatgtatcaagcttaatgagttaattcaccttattggatgtatagtcatatacataatcaagacaacctttctaggtagcaagtaacttgtgggactttgaggtgggctgtaaactatttttcagtaagcattattaaacaagaagcaccagtggtctagtggtagaatagtaccctgccacggtacagacccgggttcgattcccggctggtgcataaaattatcagagcaatgatgataacattgcgcctctatgt

SEQ ID NO: 6 - DNA, 5420 bp, Beta vulgaris
atggcaacagaggaagcaaataaagtggtgactgaaacaccggcaccaccggtaactccgccgcaagaaccgccagcaacagtttcagaaacccgggaatcaccggttgcggtggaagagaaaagtttagtccctgtatcaacccctcttccttccaccactgaaaaaactcctgcttcggttgaaagttagttaacaatttatttttgtagtatatactttacttatctataattttaattattatatgatgatcattatattatagtatatggctaattttgctttattcaagaatatttagtgatttaagggcttttaattttattaaacttttctcaattcccctgttctttttaatcattacttgaagtttaggtagagttcgtttggttcacctcaaattctattggaattcggattttttaggaagtacaaaataggatagttgttttgtatgcacgaattagggaattcatggtaaacagaatttccaaggaaatggaaattctgatgtataggaaattaatcacaacctcttagtaatttgaaattcctatgtcaattacaaatttatatgctcaaccaaataccaaaaattattttctcggatatagacaagagaatttacttcttatgaaatcagacttcccatgagaattaagtttcaacggtaaccaaacgagtttttagttttttcccatgtgatataaagatgggtcatgggtggtagttttccaattatatatttttactatttttggtggatgggtgttcttatttttccttaatttgttatttatttctgcttattatccatgtttgttaaggagattacttgcttattttaagaatatcatgagtgttatttgggaataatagggacttatctgagggctttttctggatcatgaggtttgaagtaaagtggttgggcaactttatatcctttaacttgggcacttttatagtatattcaaaactattttttcgctcattgctcatttaaatgatttcaaatgagcaaattaacaactataattgaagaaattagcctaagctcatggtacgcctgaatgtatggtgtagattttgattatcttagactttcttgtgcgttacacagtgattaaagagtaaaggcaaagtgctaattttggttatactaagtttttaatactatttgatcctttgttactttgtcctttgatgataaaacctatgtaagcaaagtgcactattcatgaatcatgatactggccattagctattatctatgttacttagacacacagattggatgtctactcggatgtgggtgtccaaagtgtctgattcggctattttggaaaaaagtctaagtttccggtttaaaatgaagcatacaattaaagtgtcatgtcagacacgacacgacacgacaccccgtttttgaggtaaatgaaggtgtcggattaacacaggctattatcattcatcaaacagaaattagaagctattacatctttaactatacttggacaaccacctagctatacacgagtcgggaactcaattagagtaaggtgagccatatgagccgctaagttggctgtctataatcatgaataaacgtaactaaattaaaagaactagtaagagatcaggtatccttaacaaccatatctgcataagattcatcacacttgttttcattaatcatctttactacctgcaggcaattactttcaattataatatcccacgcatagcattgggtagccattttcattccgagcactatagccttcccttctgtcacattcgtttcccacaagtgtttcactttttgacacgccatatgaatgatatgcccaccatgatctcgtataacaattcccattccgattcccacctccttaaagatcgcagcgtctacattgattttcagcacattatagcttggacagcaccacaccacactagagtgctgcccaccagtctgatctgcagcaggcagactcatgtgtatgctgtccttcccctctgtaccagccagttcaaaggcagctggtgctgtacacagttctggaaggtgacgggcaatgctgccatgataaacattgttccgttcattccaaatcatccatgccagtattgcaactttacaactctcctcctataaaacatccatccaccatgcaacccagtcactagcgcatcatattgggattccagaatactctccaacccgcctcttcccaaaggatactgggtatttcttaatcactatttctaaatcaacgcaagggtgtttgttacataaatctttacaattcttgcatagcatttccttatgtaaatgaacatgctcaaaatgttttatcaaactatttttgttaaacatataatagaatttcccttgaagtaccagtgatgtgcacagtatcagcgggagctcaaaagttgcaaaagcttagctatgatgatgctataaacttaagagtatatatcaggttattatttataaactaaagttgagtcttaaggtgggttgaacttggaattttgtgctcaaagacactcgagctcaaattactacaaggcacaagctgagttgtgatatcccaagtttaagctgtctttaacacccctacctataacctatgcacgactgttgctatttactgttttcttggttcataaggagcctagagggcaatgatgcacatggttggaaactttgttcttgtgtttcagtgtatcactacattagaaaattttcatccgagctagccaatgtatgctcattatatcttgtaataaatacagctatcacttacttttttctatctgaggttgtttgctagattatgactttggactagcagtatcgcaaaatgcgtataaatgaaatcaaagactcatttttatctcataattttctctttaaatttgtattttcattcagcgtgtgttaattggcttcaaatttaaaattattcactttttattgacctcttttttttagaggattcacttttattaactagtacactgtatctgatggacagaggttacagaattatctgaagaaaagcctctagaggaaaagcctatagaggagaagcctttagagggctcagttggtagaggtaatagtttcactcatcttgttgtaaacgagcttaataagttcagtttcagcttatatcttattgttgttgtattcagatgctcagctagcacgagttcaaactgagaagagaatttcactgatcaaagcatgggaagaaagtgaaaaatgcaaggccgaaaacaagtaagagtactttgtatggatatgattagatattagtactacacccacaggctatacaaatatacattatcatgtcatttagagatcacatactcaaaatagcaatgggaatctcaggggtgcttgaaccatgagtgaattatttggctaaagttgttttttggtgctaaagaatatgagactcctagcaagaaaagaagaatctaataagtcttaactccaccattgcaaggtcgttaacaatagaaaaactcttgtgacttaatttaagttaaccaagcgataggtaggcctcatgccaagttacaagatttttcacacatacgcgtgacaaatatagctgtctagcttgctcttaacaataagcttggcgaggttcttaagtggtttgtcacattgctcgtaccaaccagtatcactcttgtcacctgtcaatgcatcaattagctctccctatatacttgctggacctgggataaccattatatactctgtattaattctttgtattatacttgaataggtctaaaggccaacatttgggttagtctctagaagttgctggagtaaatttgtgcctatagttgaatggttccgtgctttaaccttccctttgaatatcgctaagagttcagtctttggagcatcacatcgaccatatatttagctgactaagcgctgatacaattgcttaagcgctccttcccctactgtttagcaactcttggactgcctcatcctttgcatcagtgaacgtatgttgagtagtttaatcctttccatcattccatgactcctttaaccctcatccactctagccaaaaacaaaatcaaatttgttgtgtgattttgatggttgagaatttgagatacaaaatagccttttgcctcctttaccataaccaccgtattgtcaatttgttataagacccatatgactcattagcctatatgggaaagtcttagatcaatttactcattctgtttccatttgttcttgcttcaaattagaggtggttattggacagggtagtccaatggttaaagggttagggtcaattttacagggcttttattggtcagggttttattggacagggttattattggatagggtcattatagggtcaacaaagaaacccaataattttataaaataaaattagttttgtaaaaacaattacatattcggattcgcattcatttatacttacttttggctcttcttgttccttgtttttcttgctcgtttaccgacccacccattatcgacccgctataagccctctacccatttggcccgacctgctaccgaccctttatgaggcgaccctcttatgacccaaacccgcttccgacccgtactgaccctgacccgacccgtccaataaccaggtctacttcaaatatgtaggaagatacaaaagaaagtgggtaataaagaagaaagagtaagcgcatataatgatataattataagcaaggcatgtttggcatctatctagaatctggttttgggttttaagatttttcaagtcatatgatgtgaaatgtatgatggacttaaattaagccatattcaaagtaatcatgtctatatcgaaatctgacaacagaactcgaaaatattttttctggtttggacatttctatttaattggaaacacaaatgataacgaagagacactctattgatagaccctttaatttgatggaagttacacaaatttacttgctaaaaattgcgcagggcacacaagaaaattgctgctatcgaggcatgggagaacagcaagaaagcatctcttgaggcagagctgaaaaagatcgaggtatagtgccattaaacagctatctttatctcaagttattttcgaacaatagaagtttgttgagctgatgaggccagcttacatgagtgcaggaaagcttggaaaaaaagaaggcagaatatgcagaaaaaatgaagaacaaagtggctatgactcacaaggaagcagaggagaagaaggctacggttgaagccaaacgtgctgaagatgttctgaaagcggaagagatggctgctaagtatcgcgccactggaaagccccccaagaaacttcttggtttgttctaa

SEQ ID NO: 7 - DNA, 633 bp, Artificial Sequence
  cDNA of remorin gene - haplotype 2
atggcaacagaggaagcaaataaagtggtgactgaaacaccggcaccaccggtaactccgccgcaagaaccgccagcaacagtttcagaaacccgggaatcaccggttgcggtggaagagaaaagtttagtccctgtatcaacccctcttccttccaccactgaaaaaactcctgcttcggttgaaaaggttacagaattatctgaagaaaagcctctagaggaaaagcctatagaggagaagcctttagagggctcagttggtagagatgctcagctagcacgagttcaaactgagaagagaatttcactgatcaaagcatgggaagaaagtgaaaaatgcaaggccgaaaacaaggcacacaagaaaattgctgctatcgaggcatgggagaacagcaagaaagcatctcttgaggcagagctgaaaaagatcgaggaaagcttggaaaaaaagaaggcagaatatgcagaaaaaatgaagaacaaagtggctatgactcacaaggaagcagaggagaagaaggctacggttgaagccaaacgtgctgaagatgttctgaaagcggaagagatggctgctaagtatcgcgccactggaaagccccccaagaaacttcttggtttgttctaa

SEQ ID NO: 8 - protein, 210 aa, Beta vulgaris
MATEEANKVVTETPAPPVTPPQEPPATVSETRESPVAVEEKSLVPVSTPLPSTTEKTPASVEKVTELSEEKPLEEKPIEEKPLEGSVGRDAQLARVQTEKRISLIKAWEESEKCKAENKAHKKIAAIEAWENSKKASLEAELKKIEESLEKKKAEYAEKMKNKVAMTHKEAEEKKATVEAKRAEDVLKAEEMAAKYRATGKPPKKLLGLF

SEQ ID NO: 9 - DNA, 8887 bp, Beta vulgaris
atagatgacgtggtttaacttttgtactatttacactcactcctttgatcatgttttatgatttttacgtttgaaatatatatttatgtcggatattattagattcatcttgatatatattttcaaaatattaactttttataattattatatgtagggagttagatatattaatagttaagtttctgcgttggcaagtgcgtccggaattgtgtctcaagtatgttgaaacgaaggaagtatatatgtcattacaaaggtcgcgatgtataaaaaagtgattgcatttacatatgggtcactatgtgttccacgtacaatatttgacatgcataaccttttaatccacaataacattattacaatttgcaaaccaggtcaacataaatcttactctaaactattaaacatggggaaaatcaagtaattaacatattccttttaacttcaccccaaaagataaacatttttcttagtggtcgtttggtaaataggaaattatgtaggcaatagaaattcccatgattttcatatttgtgtagttgcttagttgacagaaagtgaggaaaacgggggcaatgcaaattcatgagaatttgaaattcccacaaaatatacgaatttatttacctactcttcccttggtcactcacaattgctacataaattcttatgaattacaactttcctactaccaaacaatttaaactaatttataggaatttcataaaggaaataattttctacaaattgtaaattcctatagaaatttaattcccattgcaaccaaacaaacactaacactccgagagaaccaacaatccaactcccgatcctaaaaccataactacaagctatttttactactctattccttttaatataatcatgattcattatcaccagcctttacaaattacaatattagtaacagtggattattttccaataaaaaagaatgattaatgtgtgattttgttataagttcttaaaactaatatggtttatgctcgtgtgcaatcattatcctatttttgcaacaaaatgctaagagcttttgggttcaatggtatcacttcctattttctatatggaaaattaaggatcaaaatttggtggaagcataatttcaatgttgtctggggtggggattggggtacttgttggacatctgggtgagactcttgtgcaagaacaacctaaaagtattcttcttaccatgtggtttccgaaaggaggcccaaaaaaatcaacaaaataacaaaaaacaaagatcaatgacaactactttttatttttggtgtaaaggaggatcaacgtaataatcttgtcgagtttgatcccaagtcttaactcttaagtattattccatgagatattactaactaggactgttctctaattctcttcaccattaaaaaaaaaatccgagccaaataagttcaaataatatctaactaaaactaatacaatacttaaaaataagtttcgataagattgaatcaggtctaattaattcaattcaaataagttcggattttttgagatgaaaacaacgctaccttggcatccacaagaatgacaactatgaaaaggtcattttggctctattatttttggtttgattgcttgcaccaactctcaactctcaactctcaactctcaactctctagtctctcctcgttcttattcattccagctaatgaagctgctatcgttatcataaacttccctctaactcctttctaacttcccttccactactcctcttcattttctctctcctccctccctcctttcttttcttcttctcttttttctgggaacttcacaatatattaaaaaagtacttttgattgtaatacatatggcaacagaggaagcaaataaagtggtgactgaaacaccggcaccaccggtaactccgccacaagaaccgccagcaacagtttcagaaacccgggaatcaccggttgcggtggaagagaaaagtttagtccctgtatcaacccctcttccttccaccactgaaaaaactcctgcttcggttgaaagttagttaacaatttatttttgtagtatatactttacttatctataattttaattattatatgatgatcattatattatagtatatggctaattttgctttattcaagaatatttagtgatttaagggcttttaattttattaaacttttctcaattcccctgttctttttaatcattacttgaagtttaggtagagttcgtttggttcacctcaaattctattggaattcggatttttttaggaagtacaagataggatagttgttttgtatgcacgaattagggaattcatggtaaacagaatttccaaggaaatggaaattctgatgtataggaaattaatcacaacctcttagtaattagaaattcctatgtcaattacaaatttatatgctcaaccaaataccaaaaatcattttctcggatatagacaagagaatttacttcttatgaaatcagacttcccatgagaattaagtttcaacggtaaccaaacgagcttttagttttttcccatgtgatataaagatgggtcatgggtggtagttttccaattatatatttttttggtggatgggtgtttttatttttccttaatttggtatattttctgcatattatccatgtttgttaaggagattacttgcttattttaagaatatcatgagtgtttatttgggaatatcagggacttatctgagggctttttctggatcaggaggtttgaattaaagtggttgggcaactttatatcctttaacttgggcacttgtatagtatattcaaaactatttttttcattcattgctcatttaaatgatttcaaatgagcaaattaacaactataattgaagaaattagcctaagctcatggtacgcctgagtatatggtgtagattttgattatcttagactttcttgcgcgttacgcagtgattaaagagtaaaggcaattccagctaaatagctaattttggttatgctaagttttttgatactatttgattctttgtttctttgtcctttgatgataaaacctatgtaagcaaagtgcactattcatgaatcatgatactggccattagctattatctatgttacttagacacacggattgggtgtctactcggatgtgggtgtccactgtccaagtgtctgactcggctattttggaaaaaagtctaagtttccggtttaaaatgaagtatacaagtaaagtgtcgtgtcggacacgacacgacacgacaccccgtttttgaggtaaatgaaggtgtcggagtaacacaagctattatcattcatcaaacagaaattagaagctattacatctttaactatacttggacaaccacctagctatacacgagtcgggaactcaattagagtaaggtgagccatatgagccgctaagttggctgtctataatcatgaataaacctaactaaattaaaagaactagtaagagatcaggtatccttaacaaccattcctgcataagattcgtcacacttattttcattaatcatctttactacctgcagtcaatcactttcaattataatatcccacgcatagcattggatagccattttcattccgagcactatagccttcccttccgtcacattcgtttccctcaagtgtttcactttttgacacgccatacgaatgatatgcccaccatgatcttgtataacaattcccattccgattcccacctccttaaagatcgcagcatctacattgatttccagcacattatagcttggacagcaccacaccatgatagaacgctgcccaccagtctgatctgcagcaggcagactcatgtgtctgctgtccttcccctctgtacgagccagttcaaaggcagatggggctgtacacagtcctgtagggtgacgggcaatgctgccatgataaacattgttccgtttattccaaatcatccatgctattattgcaactttacaacgctcctcctatataacatccatccaccatgcagcccagtcactagcacatcattgggattctagaatactctccaacccgcttcttcccacaggaatacagggtagttctaactcaacgcaagggtgtttgttacataaatctttataattcttgcatagcatttccttatgtaaatgaacatgctcaaaatgttttattaaactattttgtttaacatataatagaatttcccttgaagtaccagtgatgatttgcacagtatcagcgggagcacaaaagttgcaaaagcttagctatgatgatgctataaacttaagagtatatactaggttattatttataaactaaacttgagtcttaaggtgggttgaacttggaattttaagctcaaggacactcgagctcaaattactacaaggcacaagctgagtcgagatatcccaagtttaagctgtctttaacacccctacctatgcacgactgttgctgtatactgttttcttggtttataaggagcctagagggcaatgatgcacatggtttgaaactttgttcttgtgtttcagtgtatcactacattaaaaaaatttcatctgagctagccgatgtatgctaattataacctgtaataaatacagttatcacttacttttttctatctgaggttggtttgctagattatgactttggactatcagtatcgcaatatacgtataaatgaaatcaaagactcatttttatctcataattttctctttaaatttgtattttcattcagcgtgtgttacattggcttaaaataattcactttttattgacctcttctttgattcacttttattaactagtaaactgtatctgatggacagaggttacagaattatctgaagaaaagcctctagaggaaaagcccatagaggagaagcctttagagggctcagttggtagaggtaatagtttcactcatcttgttgtaaacgagcttagtaagtttgatttcagcttatatctcattgttgttgtattcagatgctcagctagcacgagttcaaactgagaagaggatttcactgatcaaagcatgggaagaaagtgaaaaatgcaaggccgaaaacaagtaagagtactttgtatggatatgattagatattagtgctacacccacaggctatacaaatatatattattatgtcatttagagatcacatactcaaaatagcaatgggaatcttaagggtgcttgaaccatgactgaattatttggcttaagttgttttttggtgctaaagaatacgagactcctagcaagaaaagaagaatataataagtcttaactccacaattgcaaggtcgttaacaatagaagaactcttgtgacttaattttagttaaccaagcgataggtaggcctcatgccaagttacaagatatttcacacatacgcgtgataaatatagctgtctagcttgctctgaacaataagcttggcgaggttcttaagtggtttgtcacattgctcgtaccaaccagtatcactcttgtcacctgtcagtgcatcaattaggtctccctatatacttgctggacctgtgataaccattctacactctgtatcaattatttgtattatacttgaataggtctaaaggccaacatttgggttagtctctaaaagttgctggagtaaatttgtgcctatagttgaatggttccgtgcttaaaccttccctttgaatattgctaagagttcagtctgtggcacatcacatcggccatatatttagctgagttaagtgctgatacaattgcttaaccgctccttcccctacccttcagcaactcttggactgcctcctcctctgcatcagtgaatgtatgttgaatagtttaaccctcatccactctaaccaaaaacaaaatcaaatttgttatgtgattttgatggttgagaatttgagatacaaaatagccttttgcctcctttaccataacaaccaccgtattgtcaatttgttatagacccatatcgctcattagcctatatgggaaagtcttagatcaatttactcattctgtttccttttgttcttgctccaaatatgtagggagatacaaaagaaagtgggtaatagaggagtaagtgcatataatgatataattataagcaaggcatgtttggcatctatctagaatctggttttgggttttaagatttttcaagtcatgatatgaaatgtatgatggacttaaaataagtcatattcaaagtaatcatgtctatatcaaaatctgacaacagaactcgaaaatattttttctggttttgacatttctatttaattggaaacacaaatgataacgaagagacacactgttgatagaccctttaatttgatggaagttacaaaacaaatttacttacttaatgaactgcgcagggcacacaagaaaattgctgctatcgaggcatgggagaacagcaagaaagcatctcttgaggcagagctgaaaaagatcgaggtatagtgccattaaacaactatctttatctcgagttattttcgaacaatagaagttcgttgaactgatgaggccagcttacatgaatgcaggaaagcttggaaaaaaagaaggcagaatatgcagaaaaaatgaagaacaaagtggctatgactcacaaggaagcagaggagaagaaggctacggttgaagccaaacgtgctgaagatgttctgaaagcggaagagatggctgctaagtatcgcgccactggaaagccccccaagaaacttcttggtttgttctaataaggattatgtgaatttagtaattacttctataaatgtttgatgtgattaacaattaagcaactcaattagtttgtgaaaaggaaattatagataagttatttgtatttttttttcatttgtatgattgttttatggctttattggtttggtaggtgtgtatagtttgggtagaacgatttaagaattggtgcacatttgtttccatgtggatattgtttctgttatgtaagtaaattggatattgtttctattatgtaagtaaattggatattggaccacaacttgtgtctcatgtctatcatttcctattgtcttgtcagtcgtttgcaaattcgcaaatacaaaggtttaacgggaaacctgttctcctctgaacagatagttggaatcgtgtgatgcccactccaagcgcatatactaaagttcccatcggagaacaattgtccaaatatcctaaattagctgaaaatcatcttagatatgaattaaactttagagcctccgaagttatcatgttgtgttatatatgtacgtagaagaattcatccgctcctgttagtgttcagctaatgaatcagtaagctgttagaagaagttatcatgttgtgttatataaggattacttaagactgttttcttactaatgaggtctaatatgtgacaaagattgtcaagattatgtaaatcatgcctgttagtataaaacaaactgcactgactaactttattcactggttggagaatcgagcaacatgttcattgctgtatctgaagtatcacctgatgcaacagaccctgagtctgtcctctgctgctgctctgttttgacacctacgtgttgcggaacttggcctgttacccctgaacaagcctctgaggaaggtgaaacacgatcgattttcaagggccgctggttttggatcttcctaaaggactctccgacctcggaattccacatagaaaagaagtgatcagagttggttctggaataacccgaggggttgtagagggattctaatgacaaccgagcctcggtctccagtcggatactttcccattggaccatatgacgggttgtatgtgacttggattgtgtagtttctgagtcatcgttgatggtttttcgtttcttcaagtggctgttccagtggttcttgacatcattgtctgttcttcctggtagccttgctgctatagcagcccacctgtaaaaatagcatgcataatacttaggacagctaacctctgttttatcaaccacggaatttctagatttgaggtatcttgctaccttgcatagaagaaatgataaacatctatacaatggatgcatctagcaaagtgtctgtgatatagtgtttgtgttgtttttctctccttttgctacttcacaaacgcataaaagacaattgacgggagagttataccttttatagtctaaacgattttttttatctttaaaactaatttgacaacgggaaaagtatcatttaagtctttaagataataaagtactagttgccttctctccttttattaagcaccgggtattattatatatgcacaatataatgaatagtgtaaaagttgtcaccttttctaattggtgatgactataatttttaaaaaatatttcatagtttaggtaagagattatgaaatgataaaaagtttcctaactatttctaaagagtatatttttcatgtgatatatggtatttgtaatcacatagttagagataataaaacaattagaggaatacctattgccaaggagtccatgaagttgaataacagtctcgttttcctcttcagagaaaggacctcgtctaatgtcaggtcttaaataattggtccatcgaagacggcaactctttccacatcgagatatacctaacatataacatcaatatgaaattttatcacataaattaacacatagaagtattatattcaatttttcatgaatgacatattcaagcttaatgagttaattcaccttattggaagtatagtcatatacataatcaagacaacctttcta

SEQ ID NO: 10 - DNA, 4972 bp, Beta vulgaris
atggcaacagaggaagcaaataaagtggtgactgaaacaccggcaccaccggtaactccgccacaagaaccgccagcaacagtttcagaaacccgggaatcaccggttgcggtggaagagaaaagtttagtccctgtatcaacccctcttccttccaccactgaaaaaactcctgcttcggttgaaagttagttaacaatttatttttgtagtatatactttacttatctataattttaattattatatgatgatcattatattatagtatatggctaattttgctttattcaagaatatttagtgatttaagggcttttaattttattaaacttttctcaattcccctgttctttttaatcattacttgaagtttaggtagagttcgtttggttcacctcaaattctattggaattcggatttttttaggaagtacaagataggatagttgttttgtatgcacgaattagggaattcatggtaaacagaatttccaaggaaatggaaattctgatgtataggaaattaatcacaacctcttagtaattagaaattcctatgtcaattacaaatttatatgctcaaccaaataccaaaaatcattttctcggatatagacaagagaatttacttcttatgaaatcagacttcccatgagaattaagtttcaacggtaaccaaacgagcttttagttttttcccatgtgatataaagatgggtcatgggtggtagttttccaattatatatttttttggtggatgggtgtttttatttttccttaatttggtatattttctgcatattatccatgtttgttaaggagattacttgcttattttaagaatatcatgagtgtttatttgggaatatcagggacttatctgagggctttttctggatcaggaggtttgaattaaagtggttgggcaactttatatcctttaacttgggcacttgtatagtatattcaaaactatttttttcattcattgctcatttaaatgatttcaaatgagcaaattaacaactataattgaagaaattagcctaagctcatggtacgcctgagtatatggtgtagattttgattatcttagactttcttgcgcgttacgcagtgattaaagagtaaaggcaattccagctaaatagctaattttggttatgctaagttttttgatactatttgattctttgtttctttgtcctttgatgataaaacctatgtaagcaaagtgcactattcatgaatcatgatactggccattagctattatctatgttacttagacacacggattgggtgtctactcggatgtgggtgtccactgtccaagtgtctgactcggctattttggaaaaaagtctaagtttccggtttaaaatgaagtatacaagtaaagtgtcgtgtcggacacgacacgacacgacaccccgtttttgaggtaaatgaaggtgtcggagtaacacaagctattatcattcatcaaacagaaattagaagctattacatctttaactatacttggacaaccacctagctatacacgagtcgggaactcaattagagtaaggtgagccatatgagccgctaagttggctgtctataatcatgaataaacctaactaaattaaaagaactagtaagagatcaggtatccttaacaaccattcctgcataagattcgtcacacttattttcattaatcatctttactacctgcagtcaatcactttcaattataatatcccacgcatagcattggatagccattttcattccgagcactatagccttcccttccgtcacattcgtttccctcaagtgtttcactttttgacacgccatacgaatgatatgcccaccatgatcttgtataacaattcccattccgattcccacctccttaaagatcgcagcatctacattgatttccagcacattatagcttggacagcaccacaccatgatagaacgctgcccaccagtctgatctgcagcaggcagactcatgtgtctgctgtccttcccctctgtacgagccagttcaaaggcagatggggctgtacacagtcctgtagggtgacgggcaatgctgccatgataaacattgttccgtttattccaaatcatccatgctattattgcaactttacaacgctcctcctatataacatccatccaccatgcagcccagtcactagcacatcattgggattctagaatactctccaacccgcttcttcccacaggaatacagggtagttctaactcaacgcaagggtgtttgttacataaatctttataattcttgcatagcatttccttatgtaaatgaacatgctcaaaatgttttattaaactattttgtttaacatataatagaatttcccttgaagtaccagtgatgatttgcacagtatcagcgggagcacaaaagttgcaaaagcttagctatgatgatgctataaacttaagagtatatactaggttattatttataaactaaacttgagtcttaaggtgggttgaacttggaattttaagctcaaggacactcgagctcaaattactacaaggcacaagctgagtcgagatatcccaagtttaagctgtctttaacacccctacctatgcacgactgttgctgtatactgttttcttggtttataaggagcctagagggcaatgatgcacatggtttgaaactttgttcttgtgtttcagtgtatcactacattaaaaaaatttcatctgagctagccgatgtatgctaattataacctgtaataaatacagttatcacttacttttttctatctgaggttggtttgctagattatgactttggactatcagtatcgcaatatacgtataaatgaaatcaaagactcatttttatctcataattttctctttaaatttgtattttcattcagcgtgtgttacattggcttaaaataattcactttttattgacctcttctttgattcacttttattaactagtaaactgtatctgatggacagaggttacagaattatctgaagaaaagcctctagaggaaaagcccatagaggagaagcctttagagggctcagttggtagaggtaatagtttcactcatcttgttgtaaacgagcttagtaagtttgatttcagcttatatctcattgttgttgtattcagatgctcagctagcacgagttcaaactgagaagaggatttcactgatcaaagcatgggaagaaagtgaaaaatgcaaggccgaaaacaagtaagagtactttgtatggatatgattagatattagtgctacacccacaggctatacaaatatatattattatgtcatttagagatcacatactcaaaatagcaatgggaatcttaagggtgcttgaaccatgactgaattatttggcttaagttgttttttggtgctaaagaatacgagactcctagcaagaaaagaagaatataataagtcttaactccacaattgcaaggtcgttaacaatagaagaactcttgtgacttaattttagttaaccaagcgataggtaggcctcatgccaagttacaagatatttcacacatacgcgtgataaatatagctgtctagcttgctctgaacaataagcttggcgaggttcttaagtggtttgtcacattgctcgtaccaaccagtatcactcttgtcacctgtcagtgcatcaattaggtctccctatatacttgctggacctgtgataaccattctacactctgtatcaattatttgtattatacttgaataggtctaaaggccaacatttgggttagtctctaaaagttgctggagtaaatttgtgcctatagttgaatggttccgtgcttaaaccttccctttgaatattgctaagagttcagtctgtggcacatcacatcggccatatatttagctgagttaagtgctgatacaattgcttaaccgctccttcccctacccttcagcaactcttggactgcctcctcctctgcatcagtgaatgtatgttgaatagtttaaccctcatccactctaaccaaaaacaaaatcaaatttgttatgtgattttgatggttgagaatttgagatacaaaatagccttttgcctcctttaccataacaaccaccgtattgtcaatttgttatagacccatatcgctcattagcctatatgggaaagtcttagatcaatttactcattctgtttccttttgttcttgctccaaatatgtagggagatacaaaagaaagtgggtaatagaggagtaagtgcatataatgatataattataagcaaggcatgtttggcatctatctagaatctggttttgggttttaagatttttcaagtcatgatatgaaatgtatgatggacttaaaataagtcatattcaaagtaatcatgtctatatcaaaatctgacaacagaactcgaaaatattttttctggttttgacatttctatttaattggaaacacaaatgataacgaagagacacactgttgatagaccctttaatttgatggaagttacaaaacaaatttacttacttaatgaactgcgcagggcacacaagaaaattgctgctatcgaggcatgggagaacagcaagaaagcatctcttgaggcagagctgaaaaagatcgaggtatagtgccattaaacaactatctttatctcgagttattttcgaacaatagaagttcgttgaactgatgaggccagcttacatgaatgcaggaaagcttggaaaaaaagaaggcagaatatgcagaaaaaatgaagaacaaagtggctatgactcacaaggaagcagaggagaagaaggctacggttgaagccaaacgtgctgaagatgttctgaaagcggaagagatggctgctaagtatcgcgccactggaaagccccccaagaaacttcttggtttgttctaa

SEQ ID NO: 11 - DNA, 633 bp, Artificial Sequence
  cDNA of remorin gene - haplotype 3
atggcaacagaggaagcaaataaagtggtgactgaaacaccggcaccaccggtaactccgccacaagaaccgccagcaacagtttcagaaacccgggaatcaccggttgcggtggaagagaaaagtttagtccctgtatcaacccctcttccttccaccactgaaaaaactcctgcttcggttgaaaaggttacagaattatctgaagaaaagcctctagaggaaaagcccatagaggagaagcctttagagggctcagttggtagagatgctcagctagcacgagttcaaactgagaagaggatttcactgatcaaagcatgggaagaaagtgaaaaatgcaaggccgaaaacaaggcacacaagaaaattgctgctatcgaggcatgggagaacagcaagaaagcatctcttgaggcagagctgaaaaagatcgaggaaagcttggaaaaaaagaaggcagaatatgcagaaaaaatgaagaacaaagtggctatgactcacaaggaagcagaggagaagaaggctacggttgaagccaaacgtgctgaagatgttctgaaagcggaagagatggctgctaagtatcgcgccactggaaagccccccaagaaacttcttggtttgttctaa

SEQ ID NO: 12 - protein, 210 aa, Beta vulgaris; identical to SEQ ID NO: 8

SEQ ID NO: 13 - DNA, 9805 bp, Beta vulgaris
atagatgacgtggtttaacttttgtactatttacactcactcctttgatcatgttttatgatttttacgtttgaaaaatatatttatgtcggatattattagattcatcttgatatatattttcaaaatattaactttttataattattatatgtagggagttagatatattaatagttaagtttctgcgttggcaagtgcgtccggaattgtgtctcaagtatgttgaaacgaaggaagtatatatgtcattacaaaggtcgcgatgtataaaaaagtgattgcatttacatatgggtcactatgtgttccacgtacaatatttgacatgcataaccttttaatccacaataacattattacaatttgcaaaccaggtcaacataaatcttactctaaactattaaacatggggaaaatcaagtaattaacatattccttttaacttcaccccaaaagataaacatttttcttagtggtcgtttggtaaataggaaattatgtaggcaatagaaattcctatgattttcatatttgtatagttgtttagttgacagaaagtgaggaaaacgggggtaatgcaaattcatgagaatttgaaattcccacaaaatatacgaatttatttacctactcttcccttggtcactcacaattgctacataaattcttatgaattacaactttcctactaccaaacaatttaaactaatttataggaatttcataaaggaattaattttctacaaattgtaaattcctatagaaatttaattcccattgcaaccaaacaaacactaacactccgagagaaccaacaatccaactcccgatcctaaaaccataactacaagctatttttactactctattccttttaatataatcatgattcattatcaccagcctttacaaattacaatattagtaacagtggattattttccaataaaaaagaatgattaatgtgtgattttgttataagttcttaaaactaatatggtttatgctcgtgtgcaatcattatcctatttttgcaacaaaatgctaagagcttttgggttcaatggtatcacttcctattttctatatggaaaattaaggatcaaaatttggtggaagcataatttcaatgttgtctggggtggggattggggtacttgttggatatctgggtgagactcttgtgcaagaacaacccaaaagtaaattcttcttaccatgtggtttccgaaaggaggcccaaaaaaatcaacaaaataacaaaaaacaaagatcaatgacaactactttttatttttggtgtaaaggaggatcaacgtaataatcttgtcgagtttgatcccaagtcttaactcttaagtattattccacgagatattactaactaggactgttctctaattctcttcaccattaaaaaaaaaatccaagccaaataagttcaaataatatctaactaaaactaatactccctccgtcccataatataagtcctgattatgtttttacgcgggaattaaggtaaagtagaatcttcttttatttaaataaaaataatcatttttattgggaaacacttgcattgtgtttttctttttaataaaatataaaaactgacattaatattgtatggtttaatgtgtagagtagttcaatggggtaaaagattccattttgtcattaatgatggtgcattgaaagctgaaattatgaggacattttgggaatgaaaggggacttatattatgggacggagggagtacaatacttaaaaataagtttcgataagattgaatcaggtctaattaattcaattcaattcaaataagttcggattttttgagatgaaaacaacgctaccttggcatccacaagaatgacaactatgaaaaggtcattttggctctattatttttggtttgattgcttgcaccaactctcaactctctctctagtctctcctcgttcttattcattccagctaatgaagctgctatcgttatcataaacttccctctaactcctttctaacttcccttccactactcttcttcattttctctctcctccctcctttcttttcttcctctttttttaggaacttcacaataaaaaaaacttaaatatacttggaagtacttttgattgtaatacatatggcaacagaggaagcaaataaagtggtgattgaaacaccggcaccaccggtaactccgccgcaagaaccgccggcaacagtttcggaaacccgggaatcaccagttgcggtggaagagaaaagtttagtccctgtatcaacccctcttccttccaccactgaaaaaactcctgcttcggttgaaagttagttaacaatttatttttgtagtatatactttacttatctataattttaattattatatgatgatcattatattatagtatatggctaattttgctttattcaagaatatttagtgatttaagggctttaaattttattaaacttttctcaattcccctgttctttttaatcattacttgaagtttaggtagagttcgtttggttcacctcaaattctattggaattcggattttttaggaagtacaaaataggatagttgttttgtatgcacgaattagggaattcatggtaaacagaatttccaaggaaatggaaattctgatgtataggaaattaatcacaacctcttagtaatttgaaattcctatgtcagttacaaatttatatgctcaaccaaataccaaaaatcattttctcggatatagacaagagaatttacttcttatgaaatcagacttcccatgagaattaagtttcaacggtaaccaaacgagcttttagtttttacccatgtgatataaagatgggtcatgggtggtagttttccaattatatatttttactatttttggtggatgggtgttcttatttttccttaatttgttatttatttctgcttattatccatgtttgttaaggagattacttgcttattttaagaatatcatgagtgttatttgggaataatagggacttatctgagggctttttctggatcatgaggtttgaagtaaagtggttgggcaactttatatcctttaacttgggcacttttatagtatattcaaaactattttttcgctcattgctcatttaaatgatttcaaatgagcaaattaacaactataattgaagaaattagcctaagctcatggtacgcctgaatgtatggtgtagattttgattatcttagactttcttgtgcgttacagagtgattaaagagtaaaggcaaagtgctaattttggttatactaagtttttaatactatttgatcctttgttactttgtcctttgatgataaaacctatgtaagcaaagtgcactattcatgaatcatgatactggccattagctattatctatgttacttagacacacagattgggtgtctactcggatgtgggtgtccaaagtgtctgactcggctattttggaaaaaagtctaagtttccggtttaaaatgaagtatacaattaaagtgtcatgtcggacacgacaccccgtttttgaggtaaatgaaggtgtcggagtaacacaggctattatcattcatcaaacagaaattagaagctattacatctttaactatacttggacaaccacctagctatacacgagtcgggaactcaattagagtaaggtgagccatatgagccgctaagttggctgtctataatcatgaataaacctaactaaattaaaagaactagtaagagatcaggtatccttaacaaccatatctgcataagattcatcacacttgttttcattaatcatctttactacctgcaggcaattactttcaattataatatcccacgcatagcattgggtagccattttcattccgagcactatagccttcccttctgtcacattcgtttcccacaagtgtttcactttttgacacgccatatgaatgatatgcccaccatgatctcgtataacaattcccattccgattcccacctccttaaagatcgcagcgtctacattgattttcagcacattatagcttggacagcaccacaccacactagagtgctgcccaccagtctgatctgcagcaggcagactcatgtgtatgctgtccttcccctctgtaccagccagttcaaaggcagctggtgctgtacacagttctggaaggtgacgggcaatgctgccatgataaacattgttccgttcattccaaatcatccatgccagtattgcaactttacaactctcctcctataaaacatccatccaccatgcaacccagtcactagcgcatcatattgggattccagaatactctccaacccgcctcttcccaaaggatactgggtatttcttaatcactatttctaaatcaacgcaagggtgtttgttaaataaatctttacaattcttgcatagcatttccttatgtaaatgaacatgctcaaaatgttttatcaaactatttttgttaaacatataatagaatttcccttgaagtaccagtgatgtgcacagtatcagcgggagctcaaaagttgcaaaagcttagctatgatgatgctataaacttaagagtatataccaggttattatttataaactaaagttgagtcttaaggtgggttgaacttggaattttgtgctcaaagacactcgagctcaaattactacaaggcacaagctgagttgtgatatcccaagtttaagctgtctttaacacccctacctataacctatgcacgactgttgctatttactgttttcttggttcataaggagcctagagggcaatgatgcacatggttggaaactttgttcttgtgtttcagtgtatcactacattaaaaaaatttcatccgagctagccaatgtatgctcattatatcttgtaataaatacagctatcacttacttttttctatctgaggttgtttgctagattatgactttggactagcagtatcgcaaaatgcgtataaatgaaatcaaagactcatttttatctcataattttctctttaaatttgtattttcattcagcgtgtgttaattggcttcaaatttaaaattattcactttttattgacctcttttttttagaggattcacttttattaactagtacactgtatctgatggacagaggttacagaattatctgaagaaaagcctctagaggaaaagcctatagaggagaagcctttagagggctcagttggtagaggtaatagtttcactcatcttgttgtaaacgagcttaataagttcagtttcagcttatatcttattgttgttgtattcagatgctcagctagcacgagttcaaactgagaagagaatttcactgatcaaagcatgggaagaaagtgaaaaatgcaaggccgaaaacaagtaagagtactttgtatggatatgattagatattagtactacacccacaggctatacaaatatacattatcatgtcatttagagatcacatactcaaaatagcaatgggaatctcaggggtgcttgaaccatgagtgaattatttggcttaagttgttttttggtgctaaagaatatgagactcctagcaagaaaagaagaatctaataagtcttaactccaccattgcaaggtcgttaacaatagaaaaactcttgtgacttaatttaagttaaccaagcgataggtaggcctcatgccaagttacaagatttttcacacatacgcgtgacaaatatagctgtctagcttgctcttaacaataagcttggcgaggttcttaagtggtttgtcacattgctcgtaccaaccagtatcactcttgtcacctgtcaatgcatcaattagctctccctatatacttgctggacctgggataaccattatatactctgtattaattctttgtattatacatgaataggtctaaaggccaacatttgggttagtctctagaagttgctggagtaaatttgtgcctatagttgaatggttccgtgcttaaaccttcctttgaatatcgctaagagttcagtctttggagcatcacatcgaccatatatttagctgagtaagcgctgatacaattgcttaagcgctccttcccctactgttcagcaactcttggactgcctcatcctttgcatcagtgaacgtatgttgagtagtttaatcctttccatcattccatgactcctttaaccctcatccactctagccaaaaacaaaatcaaatttgttgtgtgattttgatggttgagaatttgagatacaaaatagccttttgcctcctttaccataaccaccgtattgtcaatttgttataagacccatatgactcattagcctatatgggaaagtcttagatcaatttactcattctgtttccatttgttcttgcttcaaattagaggtggttattggacagggtagtccaatggttaaagggttagggtcaattttacagggcttttattggtcagggttttattggacagggtcattattggatagggtcattatagggtcaacaaagaaacccaataattttaaaaaataaaattagttttgtaaaaacaattacatattcggattcgcattcatttatacttacttttggctctttttgttccttgtttttcttgctcgtttaccgacccacccattatcgacccgctataagccctctacccatttggcccgacctgctaccgaccctttatgaggcgaccctcttatgacccaaacccgcttccgacccgtactgaccctgacccgacccgttcaataaccaggtctacttcaaatatgtaggaagatacaaaagaaagtgggtaataaagaagaaagagtaagtgcatataatgatataattataagcaaggcatgtttggcatctatctagaatctggttttgggttttaagatttttcaagtcatatgatgtgaaatgtatgatggacttaaattaagccatattcaaagtaatcatgtctatatcgaaatctgacaacagaactcgaaaatattttttctggtttggacatttctatttaattggaaacacaaatgataacgaagagacactctattgatagaccctttaatttgatggaagttacacaaatttacttgctaaaaattgcgcagggcacacaagaaaattgctgctatcgaggcatgggagaacagcaagaaagcatctcttgaggcagagctgaaaaagatcgaggtatagtgccattaaacagctatctttatctcaagttattttcgaacaatagaagtttgttgagctgatgaggccagcttacatgagtgcaggaaagcttggaaaagaagaaggcagaatatgcagaaaaaatgaagaacaaagtggctatgactcacaaggaagcagaggagaagaaggctacggttgaagccaaacgtgctgaagatgttctgaaagcggaagagatggctgctaagtatcgcgccactggaaagccccccaagaaacttcttggtttgttctaataaggattatgtgaatttagtaattacttctataaatgtttgatgtgattaacaattaagcaagtcaattagtttgtgataaggaaattatagataagttatttgtattttttttccatttgtataattgttttatggctttattggtttggtaggtgtgtatagtttgggtagaacgatataagaattggtgcacatttgtttccatgtggatattgtttctgttatgtaagtaaattggatattgtttctattatgtaagtaaattggatattggaccacaacttgtgtctgatgtctatcatttcctattgtcttatcagtcgtttgcaaattcgcaaatacaaaggtttaacgggaaacctgttctcctctaaacagatagctggaatcgtgtgatgcccactccaagtgcatatactaaagttcccctcggagaacagttgtccaaatgtcctaaattaggtgaaaagttatcacgttatgttatatatgtacgtagaagaattcatccgctcctgttagtgttcagctaataaatcagtaagctgttagttctgcataatgtaccagtactactacaaggattacttaagactgttttcttactaatgaggtctaatatgtgacaaagattgtcaagattatgtaaatcatgcctgttagtataaaacaaactgcactgactaattttattcactggttggagaatcgagcaacatcttcattgctgtatctgaagtgtcacctgatgcaacagaccctgagtctgtcctctgctgctgctctgttttgacacctacgtgttgcggaacttggcctgttacccctgaacaagcctctgaggaaggtgaaacacgatcgattttcaagggccgcgcattttggatcttcctaaaggactctccgacctcggaattccacatagaaaagaagtgatcagagttggttctggaatatcctgaggggttgtagagggattctaatgacaatcgagcctcggtctccaatcggatactttcccattggaccatatgacgggttgtatgtgactttgatggtgtagtttctgggtaaacgttgatggtttttcgtttcttcaagtggctgttccagtggttcttgacatcattgtctgttcttcctggtagccttgctgctatagcagcccacctgtaaaaatagcatgcataatacttaggacagctaacctctgctttatcaaccacgtaatttctggatttgaggtatcttgctaccttgcatacaagaaatgataaacatctatacaatggatgcatctagcaaagtgtctgtgatatagtgtttgtgttgtttttctctccttttgctacttcacaaacgcataaaagacaattgacggaagagttataccttttatagtctaaacgagtttttatctttaaaactaatatggcaacgggaaaagtatcatttaagtctttaagataataaagtactagttgtcttctctccttttattaagcactgggtattattatatatgcacaatataatgagatttagcgtaaaagttgtcactttttttaattggcgatgactataatttttttaaaatattttatagtttaggtaagagattatgaaatgataaaaagtttcctaactatttctaaagagtatatttttcatgtgatatatggtatttgtaatcacataattagggataataaaacaattagaaaaatacctattgccaaggagtccatgaagttgaataacagactcgttttcctcttcagagaaaggacctcgtctaatgtcaggtcttaaataattggtccatcgaagacggcaactctttccacatcgagatatacctaacatatatcatcaatatgaaactttatcacataaattaacacatagaagtattatattcaatttttcatgaatgacatattcaagcttaatgagttaattcaccttattggaagtatagtcatatacataatcaagacaacctttctactttataggtagcaagtaaattgtaggactttgaggtgggctgggttaggtccaagcaagaagaaagtacttccgaaaaactggtaaagtatttttctgtaagtattactacacaagaagcaccagtggtctagtggtagaatagtaccctgccacggtacagacccgggttcgattcccggctggtgcataaattatcagagctgtgatgataatattgcgcc

SEQ ID NO: 14 - DNA, 5409 bp, Beta vulgaris
atggcaacagaggaagcaaataaagtggtgattgaaacaccggcaccaccggtaactccgccgcaagaaccgccggcaacagtttcggaaacccgggaatcaccagttgcggtggaagagaaaagtttagtccctgtatcaacccctcttccttccaccactgaaaaaactcctgcttcggttgaaagttagttaacaatttatttttgtagtatatactttacttatctataattttaattattatatgatgatcattatattatagtatatggctaattttgctttattcaagaatatttagtgatttaagggctttaaattttattaaacttttctcaattcccctgttctttttaatcattacttgaagtttaggtagagttcgtttggttcacctcaaattctattggaattcggattttttaggaagtacaaaataggatagttgttttgtatgcacgaattagggaattcatggtaaacagaatttccaaggaaatggaaattctgatgtataggaaattaatcacaacctcttagtaatttgaaattcctatgtcagttacaaatttatatgctcaaccaaataccaaaaatcattttctcggatatagacaagagaatttacttcttatgaaatcagacttcccatgagaattaagtttcaacggtaaccaaacgagcttttagtttttacccatgtgatataaagatgggtcatgggtggtagttttccaattatatatttttactatttttggtggatgggtgttcttatttttccttaatttgttatttatttctgcttattatccatgtttgttaaggagattacttgcttattttaagaatatcatgagtgttatttgggaataatagggacttatctgagggctttttctggatcatgaggtttgaagtaaagtggttgggcaactttatatcctttaacttgggcacttttatagtatattcaaaactattttttcgctcattgctcatttaaatgatttcaaatgagcaaattaacaactataattgaagaaattagcctaagctcatggtacgcctgaatgtatggtgtagattttgattatcttagactttcttgtgcgttacagagtgattaaagagtaaaggcaaagtgctaattttggttatactaagtttttaatactatttgatcctttgttactttgtcctttgatgataaaacctatgtaagcaaagtgcactattcatgaatcatgatactggccattagctattatctatgttacttagacacacagattgggtgtctactcggatgtgggtgtccaaagtgtctgactcggctattttggaaaaaagtctaagtttccggtttaaaatgaagtatacaattaaagtgtcatgtcggacacgacaccccgtttttgaggtaaatgaaggtgtcggagtaacacaggctattatcattcatcaaacagaaattagaagctattacatctttaactatacttggacaaccacctagctatacacgagtcgggaactcaattagagtaaggtgagccatatgagccgctaagttggctgtctataatcatgaataaacctaactaaattaaaagaactagtaagagatcaggtatccttaacaaccatatctgcataagattcatcacacttgttttcattaatcatctttactacctgcaggcaattactttcaattataatatcccacgcatagcattgggtagccattttcattccgagcactatagccttcccttctgtcacattcgtttcccacaagtgtttcactttttgacacgccatatgaatgatatgcccaccatgatctcgtataacaattcccattccgattcccacctccttaaagatcgcagcgtctacattgattttcagcacattatagcttggacagcaccacaccacactagagtgctgcccaccagtctgatctgcagcaggcagactcatgtgtatgctgtccttcccctctgtaccagccagttcaaaggcagctggtgctgtacacagttctggaaggtgacgggcaatgctgccatgataaacattgttccgttcattccaaatcatccatgccagtattgcaactttacaactctcctcctataaaacatccatccaccatgcaacccagtcactagcgcatcatattgggattccagaatactctccaacccgcctcttcccaaaggatactgggtatttcttaatcactatttctaaatcaacgcaagggtgtttgttaaataaatctttacaattcttgcatagcatttccttatgtaaatgaacatgctcaaaatgttttatcaaactatttttgttaaacatataatagaatttcccttgaagtaccagtgatgtgcacagtatcagcgggagctcaaaagttgcaaaagcttagctatgatgatgctataaacttaagagtatataccaggttattatttataaactaaagttgagtcttaaggtgggttgaacttggaattttgtgctcaaagacactcgagctcaaattactacaaggcacaagctgagttgtgatatcccaagtttaagctgtctttaacacccctacctataacctatgcacgactgttgctatttactgttttcttggttcataaggagcctagagggcaatgatgcacatggttggaaactttgttcttgtgtttcagtgtatcactacattaaaaaaatttcatccgagctagccaatgtatgctcattatatcttgtaataaatacagctatcacttacttttttctatctgaggttgtttgctagattatgactttggactagcagtatcgcaaaatgcgtataaatgaaatcaaagactcatttttatctcataattttctctttaaatttgtattttcattcagcgtgtgttaattggcttcaaatttaaaattattcactttttattgacctcttttttttagaggattcacttttattaactagtacactgtatctgatggacagaggttacagaattatctgaagaaaagcctctagaggaaaagcctatagaggagaagcctttagagggctcagttggtagaggtaatagtttcactcatcttgttgtaaacgagcttaataagttcagtttcagcttatatcttattgttgttgtattcagatgctcagctagcacgagttcaaactgagaagagaatttcactgatcaaagcatgggaagaaagtgaaaaatgcaaggccgaaaacaagtaagagtactttgtatggatatgattagatattagtactacacccacaggctatacaaatatacattatcatgtcatttagagatcacatactcaaaatagcaatgggaatctcaggggtgcttgaaccatgagtgaattatttggcttaagttgttttttggtgctaaagaatatgagactcctagcaagaaaagaagaatctaataagtcttaactccaccattgcaaggtcgttaacaatagaaaaactcttgtgacttaatttaagttaaccaagcgataggtaggcctcatgccaagttacaagatttttcacacatacgcgtgacaaatatagctgtctagcttgctcttaacaataagcttggcgaggttcttaagtggtttgtcacattgctcgtaccaaccagtatcactcttgtcacctgtcaatgcatcaattagctctccctatatacttgctggacctgggataaccattatatactctgtattaattctttgtattatacatgaataggtctaaaggccaacatttgggttagtctctagaagttgctggagtaaatttgtgcctatagttgaatggttccgtgcttaaaccttcctttgaatatcgctaagagttcagtctttggagcatcacatcgaccatatatttagctgagtaagcgctgatacaattgcttaagcgctccttcccctactgttcagcaactcttggactgcctcatcctttgcatcagtgaacgtatgttgagtagtttaatcctttccatcattccatgactcctttaaccctcatccactctagccaaaaacaaaatcaaatttgttgtgtgattttgatggttgagaatttgagatacaaaatagccttttgcctcctttaccataaccaccgtattgtcaatttgttataagacccatatgactcattagcctatatgggaaagtcttagatcaatttactcattctgtttccatttgttcttgcttcaaattagaggtggttattggacagggtagtccaatggttaaagggttagggtcaattttacagggcttttattggtcagggttttattggacagggtcattattggatagggtcattatagggtcaacaaagaaacccaataattttaaaaaataaaattagttttgtaaaaacaattacatattcggattcgcattcatttatacttacttttggctctttttgttccttgtttttcttgctcgtttaccgacccacccattatcgacccgctataagccctctacccatttggcccgacctgctaccgaccctttatgaggcgaccctcttatgacccaaacccgcttccgacccgtactgaccctgacccgacccgttcaataaccaggtctacttcaaatatgtaggaagatacaaaagaaagtgggtaataaagaagaaagagtaagtgcatataatgatataattataagcaaggcatgtttggcatctatctagaatctggttttgggttttaagatttttcaagtcatatgatgtgaaatgtatgatggacttaaattaagccatattcaaagtaatcatgtctatatcgaaatctgacaacagaactcgaaaatattttttctggtttggacatttctatttaattggaaacacaaatgataacgaagagacactctattgatagaccctttaatttgatggaagttacacaaatttacttgctaaaaattgcgcagggcacacaagaaaattgctgctatcgaggcatgggagaacagcaagaaagcatctcttgaggcagagctgaaaaagatcgaggtatagtgccattaaacagctatctttatctcaagttattttcgaacaatagaagtttgttgagctgatgaggccagcttacatgagtgcaggaaagcttggaaaagaagaaggcagaatatgcagaaaaaatgaagaacaaagtggctatgactcacaaggaagcagaggagaagaaggctacggttgaagccaaacgtgctgaagatgttctgaaagcggaagagatggctgctaagtatcgcgccactggaaagccccccaagaaacttcttggtttgttctaa

SEQ ID NO: 15 - DNA, 633 bp, Artificial Sequence
  cDNA of remorin gene - haplotype 4
atggcaacagaggaagcaaataaagtggtgattgaaacaccggcaccaccggtaactccgccgcaagaaccgccggcaacagtttcggaaacccgggaatcaccagttgcggtggaagagaaaagtttagtccctgtatcaacccctcttccttccaccactgaaaaaactcctgcttcggttgaaaaggttacagaattatctgaagaaaagcctctagaggaaaagcctatagaggagaagcctttagagggctcagttggtagagatgctcagctagcacgagttcaaactgagaagagaatttcactgatcaaagcatgggaagaaagtgaaaaatgcaaggccgaaaacaaggcacacaagaaaattgctgctatcgaggcatgggagaacagcaagaaagcatctcttgaggcagagctgaaaaagatcgaggaaagcttggaaaagaagaaggcagaatatgcagaaaaaatgaagaacaaagtggctatgactcacaaggaagcagaggagaagaaggctacggttgaagccaaacgtgctgaagatgttctgaaagcggaagagatggctgctaagtatcgcgccactggaaagccccccaagaaacttcttggtttgttctaa

SEQ ID NO: 16 - protein, 210 aa, Beta vulgaris
MATEEANKVVIETPAPPVTPPQEPPATVSETRESPVAVEEKSLVPVSTPLPSTTEKTPASVEKVTELSEEKPLEEKPIEEKPLEGSVGRDAQLARVQTEKRISLIKAWEESEKCKAENKAHKKIAAIEAWENSKKASLEAELKKIEESLEKKKAEYAEKMKNKVAMTHKEAEEKKATVEAKRAEDVLKAEEMAAKYRATGKPPKKLLGLF

SEQ ID NO: 17 - DNA, 9388 bp, Beta vulgaris
  misc_feature (1336)..(1372): n is a, c, g, or t
  misc_feature (6213)..(6235): n is a, c, g, or t
atagatgacgtggtttaacttttgtactatttacactcactcctttgatcatgttttatgatttttacgtttgaaaaatatatttatgtcggatattattagattcatcttgatatatattttcaaaatattaactttttataattattatatgtagggagttagatatattaatagttaagtttctgcgttggcaagtgcgtccggaattgtgtctcaagtatgttgaaacgaaggaagtatatatgtcattacaaaggtcacgatgtataaaaaagtgattgcatttacatatgggtcactatgtgttccacgtacaatatttgacatgcataaccttttaatccacaataacattattacaatttgcaaaccaggtcaacataaatcttactctaaactattaaacatggggaaaatcaagtaattaacatattccttttaacttcaccccaaaagataaacatttttcttagtggtcgtttggtaaataggaaattatgtaggcaatagaaattcccatgattttcatatttgtgtagttgtttagttgacagatagtgaggaaaacgggggcaatgcaaattcatgagaatttgaaattcccacaaaatatacgaatttatttacttactcttcccttggtcactcacaattgctacataaattcttatgaattacaactttcctactaccaaacaatttaaactaatttataggaatttcataaaggaattaattttctacaaattgtaaattcctatagaaatttaattcccattgcaaccaaacaaacactaacactccgagagaaccaacaatccaactcccgatcctaaaaccataactacaagctatttttactactctattccttttaatataatcatgattcattatcactagcctttacaaattacaatattagtaacagtggattattttccaataaaaaagaatgattaatgtgtgattttgttataagttcttaaaactaatatggtttatgctcgtgtgcaatcattatcctatttttgcaacaaaatgctaagagtttttgggttcaatggtatcacttcctattttctatatggaaaattaaggatcaaaatttggtggaagcataatttcaatgttgtctggggtggggattgggtagaggtgatcattttggcccggcccgtttttgggccgggttttgggcagaatttttcggcccgcgggccgggccgggcccggtcgttttttttttgtttttgggcgggctttgggcaagctaaaaacgactttttagtctattttttggcccggcccgttttggcccgcaaaagcccgnnnnnnnnnnnnnnnnnnnnnnnnnnnnnnnnnnnnnggattcgggtacttgttggacatctgggtgagagtcttgtgcaagaacaacccaaaagtaaattcttcttaccatgtggtttccgaaaggaggcccaaaaaaatcaacaaaataacaaaaaacaaagatcaatgacaactactttttatttttggtgtaaaggaggatcaacgtaataatcttgtcgagtttgatcccaagtcttaactcttaagtattattccacgagatattactaactaggactgttctctaattctcttcaccattaagttcaaataatatctaactaaaactaatacaatacttaaaaataagtttcgataagattgaatctggtctaattaattcaattcaaataagttcggattttttgagatgaaaacaacgctaccttggcatccacaagaatgacaactatgaaaaggtcattttggctctattatttttggtttgattgcttgcaccaactctcaactctctagtctctcctcgttcttattcattccagctaatgaagctgctatcgttatcataaacttccctctaactcctttctaacttcccttccactactcttcttcattttctctctcctccctcctttcttttcttcctcttttttctaggaacttcacaattaaaaaaacttaaatatacttggaagtacttttgattgtaatacatatggcaacagaggaagcaaataaagtggtgactgaaacaccggcaccaccggtaactccgccgcaagaaccgccagcaacagtttcagaaacccgggaatcaccggttgcggtggaagagaaaagtttagtccctgtatcaacccctcttccttccaccactgaaaaaactcctgcttcggttgaaagttagttaacaattttttttttaattatctataattttaattattattatatgatgatcattatattatagtatatggctaattttgctttattcaagaatatttagtgatttaagggcttttagaataattagtgagatttagttagttttttcccctgtgatataaagatgggtcatgggtggtagttttctgttttccaattatatatttttactatttttggtggatgggtgtttttatttttccttaatttggtattttttctgcatattatccatgtttgttaaggagattacttgcttattttaagaatatcatgagtgttatttgggaatattagggacttatcttagggctttttctggatcatgaggtttgaagtaaagtggttgggcacttttatagtatattcaaaactatttttttcgcttattgctcatttaaacgatttcaaatgagcaaataacaactataattgaagaaattagcctaagctcatggtatgcctgagtgtatggtgtataatttgattatcttagactttcttgtgcgttgcgcagtgattaaagagtaaaggcaattccagctaattttggttatactaagcttttttaatgctaattgatcctttgttactttgtccgttgatgataaacctatgtaagcaaagtgcactattcatgaatcatgatactggcctggccattagctattatctatgttacttagacacacggattgggtgtctactcggatgtgggtgtccaaagtgtctgactcggctattttggaaaaaagtctaagtttccggtttaaaatgaagtatacaattaaagtgtcatgtcggacacgacacgacacgacaccccgtttttgaggtaaatgaaggtgtcggagtaacacatgctattatcattcatcaaacagaaattagaagctattacatctttaactatacttggacaaccacctagctatacacgagtcgggaactcaattagagtaaggtgagccatatgagccgctaagttggctgtctataatcatgaataaacctaactaaattaaaagaactagtaagagatcaggtatccttaacaaccatatctgcataagattcatcacacttgttttcattaatcatctttactacctgcaggcaattactttcaattataatatcccacgcatagcattgggtagccattttcattccgagcactatagccttcccttctgtcacattcgtttcccacaagtgtttcactttttgacacgccatatgaaaaatatgcccaccatgatctcgtataacaattcccattccgattcccacctccttaaagatcgcagcgtctacattgattttcagcacattatagcttggacagcaccacaccacactagagtgctgcccaccagtctgatctgcagcaggcagactcatgtgtatgctgtccttcccctctgtaccagccagttcaaaggcagctggtgctgtacacagttctggaaggtgacgggcaatgctgccatgataaacattgttccgttcattccaaaccatccatgccagtattgcaactttacaactctcctcctataaaacatccatccaccatgcaacccagtcactagcgcatcatattgggattccagaatactctccaacccgcctcttccgaaaggatactgggtatttcttaatcactatttctaaatcaacgcaagggtgtttgttacataaatctttacaattcttgcatagcatttccttatgtaaatgaacatgctcaaaatgttttatcaaactatttttgttaaacatataatagaatttcccttgaagtaccaatgatgtgcacagtatcagcgggagctcaaaagttgcaaaagcttagctatgatgatgctataaacttaagagtatataccaggttattatttataaactaaagttgagtcttaaggtgggttgaacttggaattttgtgctcaaagacactcgagctcaaattactacaaggcacaagctgagttgtgatatcccaagtttaagctgtctttaacacccctacctataacctatgcacgactgttgctatttactgttttcttggttcataaggagcctagagggcaatgatgcacatggttggaaactttgttcttgtgtttcagtgtatcactacattaaaaaaatttcatccgagctagccaatgtatgctcattatatcttgtaataaatacagctatcacttacttttttctatctgagattgtttgctagattatgactttggactagcagtatcgcaaaatgcgtataaatgaaatcaaagactcatttttatctcataattttctctttaaatttgtattttcattcagcgtgtgttaattggcttcaaatttaaaattattcactttttattgacctcttttttttagaggattcacttttattaactagtacactgtatctgatggacagaggttacagaattatctgaagaaaagcctctagaggaaaagcctatagaggagaagcctttagagggctcagttggtagaggtaatagtttcactcatcttgttgtaaacgagcttaataagttcagtttcagcttatatcttattgttgttgtattcagatgctcagctagcacgagttcaaactgagaagagaatttcactgatcaaagcatgggaagaaagtgaaaaatgcaaggccgaaaacaagtaagagtactttgtatggatatgattagatattagtactacacccacaggctatacaaatatacattatcatgtcatttagagatcacatactcaaaatagcaatgggaatctcaggggtgcttgaaccatgagtgaattatttggcttaagttgttttttggtgctaaagaatatgagactcctagcaagaaaagaagaatctaataagtcttaactccaccattgcaaggtcgttaacaatagaaaaactcttgtgacttaatttaagttaaccaagcgataggtaggcctcatgccaagttacaagatttttcacacatacgcgtgacaaatatagctgtctagcttgctcttaacaataagcttggcgaggttcttaagtggtttgtcacattgctcgtaccaaccagtatcactcttgtcacctgtcaatgcatcaattagctctccctatatacttgctggacctgggataaccattatatactctgtattaattctttgtattatacttgaataggtctaaaggccaacatttgggttagtctctagaagttgctggagtaaatttgtgcctatagttgaatggttccgtgcttaaaccttccctttgaatatcgctaagagttcagtctttggagcatcacatcgaccatatatttagctgagtaagcgctgatacaattgcttaagcgctccttcccctactgttcagcaactcttggactgcctcatcctttgcatcagtgaacgtatgttgagtagtttaatcctttccatcattccatgactcctttaaccctcatccactctagccaaaaacaaaatcaaatttgttgtgtgattttgatggttgagaatttgagatacaaaatagccttttgcctcctttaccataaccaccgtattgtcaatttgttataagacccatatgactcattagcctatatgggaaagtcttagatcaatttactcattctgtttccatttgttcttgcttcaaattagaggtggttattggacagggtagtccaatggttaaagggttagggtcaattttacagggcttttattggtcagggttttattggacagggtcattattggatagggtcattatagggtcaacaaagaaacccaataattttaaaaaataaaattagttttgtaaaaacaattacatattcggattcgcattcatttatacttacttttggnnnnnnnnnnnnnnnnnnnnnnncgacccacccattatcgacccgctataagccctctacccatttggcccgacctgctaccgaccctttatgaggcgaccctcttatgacccaaacccgcttctgacccgtattgaccctgacccgacccgttcaataaccaggtctacttcaaatatgtaggaagatacaaaagaaagtgggtaataaagaagaaagagtaagtgtatataatgatataattataagcaaggcatgtttggcatctatctagaatctggttttgggttttaagatttttcaagtcatatgatgtgaaatgtatgatggacttaaattaagccatattcaaagtaatcatgtctatatcgaaatctgacaacagaactcgaaaatattttttctggtttggacatttctatttaattggaaacacaaatgataacaaagagacactctattgatagaccctttaatttgatggaagttacacaaatttacttgctaaaaattgcgcagggcacacaagaaaattgctgctatcgaggcatgggagaacagcaagaaagcatctcttgaggcagagctgaagaagatcgaggtatagtgccattaaacagctatctttatctcaagttattttcgaacaatagaagtttgttgagctgatgaggccagcttacatgagtgcaggaaagcttggaaaaaaagaaggcagaatatgcagaaaaaatgaagaacaaagtggctatgactcacaaggaagcagaggagaagaaggctacggttgaagccaaacgtgctgaagatgttctgaaagcggaagagatggctgctaagtatcgcgccactggaaagccccccaagaaacttcttggtttgttctaataaggattatgtgaatttagtaattacttctataaatgtttgatgtgattaacaattaagcaagtcaattagtttgtgataaggaaattatagataagttatttgtattttttttccatttgtataattgttttatggctttattggtttggtaggtgtgtatagtgtgggtagaacgatttaagaattggtgcacattattttccatgtggatattgtttctgttatgtaagtaaattggatattgtttctgtaagtaaattggatattggaccataacttgtgtctgatgtctatcatttcctattgtcttgtcagtcgtttgcaaattcgcaaatgcaaaggtttaacggaaacctgttctcctctgaatagatagttggaatcgtgtgatgcccactccaagtgcatatactaaagtccccctcggagaacagttgtccaaatatcctaaactagctgaaaattatcttagatatgaattaaactttagagcctccagagtcatcacgttatgttatatatgtacgtagaagaattcatccgctcctgttagtgttcagctaataaattagtaaactgttagttctgcataatgtaccagtactacaagaaggattatacttaagactgttatcttactaatgaggtctaatatgtgacaaagattgtcaagattatgtaaatcatgcctgttagtataaaacaaactgcactgattaattttattcgctggttggagaatcgagcaacatgttcattgctgtatctgaagtgtcatctgatgcaacagaccctgagtctgtcctctgctgctgctctgttttgacacctacgtgttgcggaacttggcctgttacccctgaacaagcctctgaggaaggtgaaacacgatcgattttcaagggcagctggttttggatcttcctaaaggactctccgacctctgaattccacatagaaaagaagtgatcagagttggttctggaatatcctgaggggttgtagagggattctaatgacaaccgagcctcggtctccaatcggatactttcccattggaccatatgacgggttgtatgtgactttgattgtgtagtttctgagtcatcgttgatggtttttcgtttcttcaagtggctgttccagtggttcttgacatcattgtctgttcttcctggtagccttgctgctatagcagcccacctgtaaaaatagcatgcataatacttaggacagctaacctctgttttatcaaccacggaatttctagatttgaggtatcttgctaccttgcatacaagaaatgataaacatctatacaatggatgcatctagcaaagtgtctgtgatatagtgtttgtgttgtttttctctccttttgctacttcacaaatgcataaaagataattgacgggagagttataccttttatggtctaaacgattttttatctttaaaattaatttgacgacgggaaaagtatcatttaagtctttaagataataaagtactagttgtcttctctccttttattaagtactgggtattattatatatgcacaatataatgagattcagcgtaaaagttgtcaccttttctaattggggatgactataattttttaaaaatatttcatagtttaggtaagagattatgaaatgataaaaagtttcctaactatttctaaagagtatatttttcatgtgatatatggtatttgtaatcacattagggataataaaacaattagaaaaatacctattgccaaggagtccatgaagttgaataacagtctcgttttcctcttcagagaaaggacctcgtctaatgtcaggtcttaaataattggtccatcgaagacgacaactttttccacatcgagatatacctaacatataacatcaatatgaaattttatcacacaaattaacacatatatagaagtaatattttcaatttttcatgaatgaaatattcaagcttaatgagttaattcaccttattggatgtatagtcatatacataatcaagacaacctttctaggtagcaagtaaattgtatgactttgaggtgggatggccggatgggttaggtccatgggcttttgaataagcaagaagtgagtacttcgggaacgtacttatttttctgtaaacccttttaaacaaaaagcaccagtggtctagtggtagaatagtaccctgccacggtacagacccgggttcgattcccggctggtgcataaaatatcagagcaatgatgataacattgcgcctctatgt

SEQ ID NO: 18 - DNA, 5041 bp, Beta vulgaris
  misc_feature (4154)..(4176): n is a, c, g, or t
atggcaacagaggaagcaaataaagtggtgactgaaacaccggcaccaccggtaactccgccgcaagaaccgccagcaacagtttcagaaacccgggaatcaccggttgcggtggaagagaaaagtttagtccctgtatcaacccctcttccttccaccactgaaaaaactcctgcttcggttgaaagttagttaacaattttttttttaattatctataattttaattattattatatgatgatcattatattatagtatatggctaattttgctttattcaagaatatttagtgatttaagggcttttagaataattagtgagatttagttagttttttcccctgtgatataaagatgggtcatgggtggtagttttctgttttccaattatatatttttactatttttggtggatgggtgtttttatttttccttaatttggtattttttctgcatattatccatgtttgttaaggagattacttgcttattttaagaatatcatgagtgttatttgggaatattagggacttatcttagggctttttctggatcatgaggtttgaagtaaagtggttgggcacttttatagtatattcaaaactatttttttcgcttattgctcatttaaacgatttcaaatgagcaaataacaactataattgaagaaattagcctaagctcatggtatgcctgagtgtatggtgtataatttgattatcttagactttcttgtgcgttgcgcagtgattaaagagtaaaggcaattccagctaattttggttatactaagcttttttaatgctaattgatcctttgttactttgtccgttgatgataaacctatgtaagcaaagtgcactattcatgaatcatgatactggcctggccattagctattatctatgttacttagacacacggattgggtgtctactcggatgtgggtgtccaaagtgtctgactcggctattttggaaaaaagtctaagtttccggtttaaaatgaagtatacaattaaagtgtcatgtcggacacgacacgacacgacaccccgtttttgaggtaaatgaaggtgtcggagtaacacatgctattatcattcatcaaacagaaattagaagctattacatctttaactatacttggacaaccacctagctatacacgagtcgggaactcaattagagtaaggtgagccatatgagccgctaagttggctgtctataatcatgaataaacctaactaaattaaaagaactagtaagagatcaggtatccttaacaaccatatctgcataagattcatcacacttgttttcattaatcatctttactacctgcaggcaattactttcaattataatatcccacgcatagcattgggtagccattttcattccgagcactatagccttcccttctgtcacattcgtttcccacaagtgtttcactttttgacacgccatatgaaaaatatgcccaccatgatctcgtataacaattcccattccgattcccacctccttaaagatcgcagcgtctacattgattttcagcacattatagcttggacagcaccacaccacactagagtgctgcccaccagtctgatctgcagcaggcagactcatgtgtatgctgtccttcccctctgtaccagccagttcaaaggcagctggtgctgtacacagttctggaaggtgacgggcaatgctgccatgataaacattgttccgttcattccaaaccatccatgccagtattgcaactttacaactctcctcctataaaacatccatccaccatgcaacccagtcactagcgcatcatattgggattccagaatactctccaacccgcctcttccgaaaggatactgggtatttcttaatcactatttctaaatcaacgcaagggtgtttgttacataaatctttacaattcttgcatagcatttccttatgtaaatgaacatgctcaaaatgttttatcaaactatttttgttaaacatataatagaatttcccttgaagtaccaatgatgtgcacagtatcagcgggagctcaaaagttgcaaaagcttagctatgatgatgctataaacttaagagtatataccaggttattatttataaactaaagttgagtcttaaggtgggttgaacttggaattttgtgctcaaagacactcgagctcaaattactacaaggcacaagctgagttgtgatatcccaagtttaagctgtctttaacacccctacctataacctatgcacgactgttgctatttactgttttcttggttcataaggagcctagagggcaatgatgcacatggttggaaactttgttcttgtgtttcagtgtatcactacattaaaaaaatttcatccgagctagccaatgtatgctcattatatcttgtaataaatacagctatcacttacttttttctatctgagattgtttgctagattatgactttggactagcagtatcgcaaaatgcgtataaatgaaatcaaagactcatttttatctcataattttctctttaaatttgtattttcattcagcgtgtgttaattggcttcaaatttaaaattattcactttttattgacctcttttttttagaggattcacttttattaactagtacactgtatctgatggacagaggttacagaattatctgaagaaaagcctctagaggaaaagcctatagaggagaagcctttagagggctcagttggtagaggtaatagtttcactcatcttgttgtaaacgagcttaataagttcagtttcagcttatatcttattgttgttgtattcagatgctcagctagcacgagttcaaactgagaagagaatttcactgatcaaagcatgggaagaaagtgaaaaatgcaaggccgaaaacaagtaagagtactttgtatggatatgattagatattagtactacacccacaggctatacaaatatacattatcatgtcatttagagatcacatactcaaaatagcaatgggaatctcaggggtgcttgaaccatgagtgaattatttggcttaagttgttttttggtgctaaagaatatgagactcctagcaagaaaagaagaatctaataagtcttaactccaccattgcaaggtcgttaacaatagaaaaactcttgtgacttaatttaagttaaccaagcgataggtaggcctcatgccaagttacaagatttttcacacatacgcgtgacaaatatagctgtctagcttgctcttaacaataagcttggcgaggttcttaagtggtttgtcacattgctcgtaccaaccagtatcactcttgtcacctgtcaatgcatcaattagctctccctatatacttgctggacctgggataaccattatatactctgtattaattctttgtattatacttgaataggtctaaaggccaacatttgggttagtctctagaagttgctggagtaaatttgtgcctatagttgaatggttccgtgcttaaaccttccctttgaatatcgctaagagttcagtctttggagcatcacatcgaccatatatttagctgagtaagcgctgatacaattgcttaagcgctccttcccctactgttcagcaactcttggactgcctcatcctttgcatcagtgaacgtatgttgagtagtttaatcctttccatcattccatgactcctttaaccctcatccactctagccaaaaacaaaatcaaatttgttgtgtgattttgatggttgagaatttgagatacaaaatagccttttgcctcctttaccataaccaccgtattgtcaatttgttataagacccatatgactcattagcctatatgggaaagtcttagatcaatttactcattctgtttccatttgttcttgcttcaaattagaggtggttattggacagggtagtccaatggttaaagggttagggtcaattttacagggcttttattggtcagggttttattggacagggtcattattggatagggtcattatagggtcaacaaagaaacccaataattttaaaaaataaaattagttttgtaaaaacaattacatattcggattcgcattcatttatacttacttttggnnnnnnnnnnnnnnnnnnnnnnncgacccacccattatcgacccgctataagccctctacccatttggcccgacctgctaccgaccctttatgaggcgaccctcttatgacccaaacccgcttctgacccgtattgaccctgacccgacccgttcaataaccaggtctacttcaaatatgtaggaagatacaaaagaaagtgggtaataaagaagaaagagtaagtgtatataatgatataattataagcaaggcatgtttggcatctatctagaatctggttttgggttttaagatttttcaagtcatatgatgtgaaatgtatgatggacttaaattaagccatattcaaagtaatcatgtctatatcgaaatctgacaacagaactcgaaaatattttttctggtttggacatttctatttaattggaaacacaaatgataacaaagagacactctattgatagaccctttaatttgatggaagttacacaaatttacttgctaaaaattgcgcagggcacacaagaaaattgctgctatcgaggcatgggagaacagcaagaaagcatctcttgaggcagagctgaagaagatcgaggtatagtgccattaaacagctatctttatctcaagttattttcgaacaatagaagtttgttgagctgatgaggccagcttacatgagtgcaggaaagcttggaaaaaaagaaggcagaatatgcagaaaaaatgaagaacaaagtggctatgactcacaaggaagcagaggagaagaaggctacggttgaagccaaacgtgctgaagatgttctgaaagcggaagagatggctgctaagtatcgcgccactggaaagccccccaagaaacttcttggtttgttctaa

SEQ ID NO: 19 - DNA, 633 bp, Artificial Sequence
  cDNA of remorin gene - haplotype 5
atggcaacagaggaagcaaataaagtggtgactgaaacaccggcaccaccggtaactccgccgcaagaaccgccagcaacagtttcagaaacccgggaatcaccggttgcggtggaagagaaaagtttagtccctgtatcaacccctcttccttccaccactgaaaaaactcctgcttcggttgaaaaggttacagaattatctgaagaaaagcctctagaggaaaagcctatagaggagaagcctttagagggctcagttggtagagatgctcagctagcacgagttcaaactgagaagagaatttcactgatcaaagcatgggaagaaagtgaaaaatgcaaggccgaaaacaaggcacacaagaaaattgctgctatcgaggcatgggagaacagcaagaaagcatctcttgaggcagagctgaagaagatcgaggaaagcttggaaaaaaagaaggcagaatatgcagaaaaaatgaagaacaaagtggctatgactcacaaggaagcagaggagaagaaggctacggttgaagccaaacgtgctgaagatgttctgaaagcggaagagatggctgctaagtatcgcgccactggaaagccccccaagaaacttcttggtttgttctaa

SEQ ID NO: 20 - protein, 210 aa, Beta vulgaris; identical to SEQ ID NO: 8

SEQ ID NO: 21 - DNA, 5009 bp, Beta vulgaris
caaatcttctggcatcaatggcggtgttgccgttcatcaatttaacatcaatggaggtaagagtcatgttttttcaacaatataaaacttatacttcctctgttctgttttaaatgaaacgtttgttttctcacgcaacccaacccacttttttaataataaatatttttagttgtgtgcacgtaaaaaatataaaaaagttataatttgatagtatcttgtttgagattgtgattattaagagagtcaagtctcacaatattcgaaagtctacgtaatccacctcaaattgacgaagaaaacaagcaggaaaggattaagtaagttcgtggaaccactagaattgattttcaaatatagctctacctaatatatggcctacttttaattttaaataaggagaaggtaatgtgattagaaacaaattggtcttaaattattcattaagcttaataatgtataaacataatcaagtgctatcttcttttcagggccgtcttgaagattttggggcccggttctattatgaaaattgggcccctaaatttatagaaaataaagatggaaggttagagttctaaagatagaaagttgaaaatctaaatataaatcattgacaaatttattaagggtgagaaacaagggtgttttcttcaaatatgaagcaaaattttcaaaataatacttcctccgtttctaaataagtgcaacatttgcataatgtttactattcacagtttaaactttaattagctttggtgatttacattttaggaaaaaacatagtcatgtgggatcttgttagattcgtctgaatgtgaatttttttaatatcaactttttataatttttacttattgataattgaagatattaatggttaaaataatgcattggcaaacgtgaaaacaagaagtgttgcacttatttagaaacggaggaagtatattttgggcctttataattttggagaccctgcgctgttgggctccttgcacaccttcatctacccctctgcttcttttgatacaatttttcagcgacatgattgtcgattgatgcatatattattgtatactcgatccatattgtttaagatgaattgtttgtctttgatggtctccaatgcatattttgtatacttaggaattctaattatgtactattagtagacattgagatgaatacataattgccataatgaagtatgattattttagttatatactttctccattccaaatatataaatgtaacacttgtgtactttatgcgtactaatgcataacaacgtgcactctcatgtgtttaattatatactttttgagagaagtgttacattggggaccatgggactgtgtataatttgaccgcaaaatcgaagtgtcgcatttgattgaaaatggagagagtagtatatagatggaacacagcagagactgctggtcatctttggccaacaaacccaaaattgatattaatcccttattcaggtcatttcatctttttgacacaaaatggatgttgtaggcactgcgctatctgctgcccaatctctgtttgcagccctgcaaagttctgagctcaaagagatcctctcgatctttggctacaaatcccgacttgatgacctccaacgcactgtctctaccatcaacgctgtattccgtgatgctgagaccaaacaggagctcactcatgaagcacagcattggctcgaggaactcaaggatgctgtctttgaagcagatgatctgttcgacgagtttgtcactcttgccgagcagaagcaacttgtagaggctggtggcagtctttccaaaaagatgcgccaattcttttctgattccaacccccttggcattgcttataggatgtcacgaggggttaagaagatcaagaagaagttggatgctatcgcttacaatcatcaatttagctttaagattgatcttgagcctatgaaagagagaaggctagagactggttctgtcgtgaacgcaggtgatatcattggaagagaggacgacttggagaagattgtaggtttgttgcttgattctaacatccaacgtgatgtgtctttccttactattgtgggaatgggagggttgggtaaaactgctcttgcccaactcgtgtacaatgatccaagggtcagaactgcttttccattgagatgttggaattgtgtgtctgatcaagatcaaaagcaactagatgtgaaagaaattttgggtaagattctggctacagctactggtaagaatcatgagggttcaaccatggatcaggtgcaaacccaactacgagaacaactatgtggcaagagatacttgcttgttttggatgatgtatggaatgagaatcctaatcaattgcgtgatctggtagaattcttcatgggaggtcgaagcagaaattggattgtggtaactacgcgttcgcacgagacagcgagaattataagagatggtccattgcacaagctccaaggtttgtctgaggaaaactcttggcgtttatttgtcaggtggaccttcggatcagtgcaagcaaaattccctaatgactttatcatgattgcacgagatatagttgacaaatgtgctcgaaaccctctggctataagagtggtaggaagtcttttgtgtggtcaagacaagagtaagtggctttcatttcatgagatcgatttaggcaacattagaaagagccataatgatatcatgccaatactgaacctaagttaccatcatcttgaacctccaattaagagatgctttagttattgtgcagtgtttccaaaggatttccttatagggaagcagacgctgataaacctctggatggcacaaggttatattgttccgttagacaaagatcaaagcatagatgatgctagtgaggaatacatatcaattttgttgcggagatgttttttcgaaaatgtcggagcagaaaaagatggtgttattaagatccatgatctcatgcatgatattgctcaaaatgtcatggggaaggagctttgtacgactaaaaacattagtggcagcttggataaaagtgttcgccatctatctcttgccagaactagttttgcaagatactctttcaatgcaactcatattcgctcctatttctgtgctggctactggtgtcaggatgctgagataaaccagttttcagttgaggcattagtaccaaactgtttgtacctaagggcaatggacctcgcttggtcgaagataaaaagtttaccagactcgattggtggattgttgcatttgaggtacttagatctttcgtataacgaagatctggaagtacttccaaactcaattgctaaactatataatctacaaaccttacaattgaagggttgcaagagattggaagggttaccaaaacatttgagcaggctggttaagcttcaaactttggatatacatggttgcaacaatgtaacttatatgcccaaaggcatgggtaagttgacttgccttcacactctcagtaagtttatagtgggtggagaagggagttgttcaagttggaagcaatgttttgatgggttggaagatctaaaggctctcaataacctaaagggtcatctggaaatccaaatcaggtggcccaaaaatactacagatgctgtcaaagaagatgttacgagggaaggattatacctgaatcataaggaacatctcaatcacattgtggttgattttagatgtgaggagggtggtggaagaatggatgatgaggaagcaagaagattgatggaagagttgcggccacatccttatcttgaaaatttggctgtgaaagcatattatggtgtgaaaatgcctggttgggcaacccttctcccaaatcttacagagctttttctttctgattgtggggaactggagaaccttccatgcctgggaaacttggatcatctaaaagtcctccgactttcgcatttggcaaaattggagtacattgaagaagatagctcatcagctaatttcaggtgtaggcctggaccagaaagtgcaggactatcattatacttcccctcccttgaacgccttgagttgaagcgtttgtgtaagttaaaaggatggaggagaggggaagggttaggagatgatcaccagccttttaatgaaagcagcagcaatacacaagtccaattacaattatgtcttcctcaattgaagtcattgagaatagaaagatgcccattgctgacatttatgccgctgtgtcccaagacagaaaaactgcatttagttgtatttaatgaacgactccggatagtgcatgctaagagagatgagaatttctatgctccattacattcatcatcatctgatcctgaaaacccgaggaacactattcccattcccatgtttagagaggtatacataaacaatgtggcgtggctaaattcgctgcctatggaggcttttaggtgtctcactcatatgacaataaaaaacgacgaggtagagagtttgggagaagttggagaggtgtttcggagctgctcatcttctttgcgatccttgaatatcacaggttgctccaacttaagaagtgtttctggagggctggagcatctcactgctttggagatgttagaaatatacgacacccataagctgagtctatcagaagacccagaaggtgttgtgccatggaaatcccttcatcactccctcagctacttgcaactgatgaatctcccacagctggtcaacctgcctgattcgatgcagttcttggctgccctccgaactctttcaatagtgcattgcactaaactgcaatcagtgccagattggatgcccagactcacttctctcaggaagcttatggtttcattctgttccgcacatctggagagaagatgccaaaatccaactggggtggactggcctaacattcaacacatcccctccattgatgtcacctctagccttcctaagtttttagtgttgccgtatgaatag

SEQ ID NO: 22 - protein, 1163 aa, Beta vulgaris
MDVVGTALSAAQSLFAALQSSELKEILSIFGYKSRLDDLQRTVSTINAVFRDAETKQELTHEAQHWLEELKDAVFEADDLFDEFVTLAEQKQLVEAGGSLSKKMRQFFSDSNPLGIAYRMSRGVKKIKKKLDAIAYNHQFSFKIDLEPMKERRLETGSVVNAGDIIGREDDLEKIVGLLLDSNIQRDVSFLTIVGMGGLGKTALAQLVYNDPRVRTAFPLRCWNCVSDQDQKQLDVKEILGKILATATGKNHEGSTMDQVQTQLREQLCGKRYLLVLDDVWNENPNQLRDLVEFFMGGRSRNWIVVTTRSHETARIIRDGPLHKLQGLSEENSWRLFVRWTFGSVQAKFPNDFIMIARDIVDKCARNPLAIRVVGSLLCGQDKSKWLSFHEIDLGNIRKSHNDIMPILNLSYHHLEPPIKRCFSYCAVFPKDFLIGKQTLINLWMAQGYIVPLDKDQSIDDASEEYISILLRRCFFENVGAEKDGVIKIHDLMHDIAQNVMGKELCTTKNISGSLDKSVRHLSLARTSFARYSFNATHIRSYFCAGYWCQDAEINQFSVEALVPNCLYLRAMDLAWSKIKSLPDSIGGLLHLRYLDLSYNEDLEVLPNSIAKLYNLQTLQLKGCKRLEGLPKHLSRLVKLQTLDIHGCNNVTYMPKGMGKLTCLHTLSKFIVGGEGSCSSWKQCFDGLEDLKALNNLKGHLEIQIRWPKNTTDAVKEDVTREGLYLNHKEHLNHIVVDFRCEEGGGRMDDEEARRLMEELRPHPYLENLAVKAYYGVKMPGWATLLPNLTELFLSDCGELENLPCLGNLDHLKVLRLSHLAKLEYIEEDSSSANFRCRPGPESAGLSLYFPSLERLELKRLCKLKGWRRGEGLGDDHQPFNESSSNTQVQLQLCLPQLKSLRIERCPLLTFMPLCPKTEKLHLVVFNERLRIVHAKRDENFYAPLHSSSSDPENPRNTIPIPMFREVYINNVAWLNSLPMEAFRCLTHMTIKNDEVESLGEVGEVFRSCSSSLRSLNITGCSNLRSVSGGLEHLTALEMLEIYDTHKLSLSEDPEGVVPWKSLHHSLSYLQLMNLPQLVNLPDSMQFLAALRTLSIVHCTKLQSVPDWMPRLTSLRKLMVSFCSAHLERRCQNPTGVDWPNIQHIPSIDVTSSLPKFLVLPYE

SEQ ID NO: 23 - protein, 1177 aa, Beta vulgaris
MERVVYRWNTAETAGHLWPTNPKLILIPYSALQSSELKEILSIFGYKSRLDDLQRTVSTINAVFRDAETKQELTHEAQHWLEELKDAVFEADDLFDEFVTLAEQKQLVEAGGSLSKKMRQFFSDSNPLGIAYRMSRGVKKIKKKLDAIAYNHQFSFKIDLEPMKERRLETGSVVNAGDIIGREDDLEKIVGLLLDSNIQRDVSFLTIVGMGGLGKTALAQLVYNDPRVRTAFPLRCWNCVSDQDQKQLDVKEILGKILATATGKNHEGSTMDQVQTQLREQLCGKRYLLVLDDVWNENPNQLRDLVEFFMGGRSRNWIVVTTRSHETARIIRDGPLHKLQGLSEENSWRLFVRWTFGSVQAKFPNDFIMIARDIVDKCARNPLAIRVVGSLLCGQDKSKWLSFHEIDLGNIRKSHNDIMPILNLSYHHLEPPIKRCFSYCAVFPKDFLIGKQTLINLWMAQGYIVPLDKDQSIDDASEEYISILLRRCFFENVGAEKDGVIKIHDLMHDIAQNVMGKELCTTKNISGSLDKSVRHLSLARTSFARYSFNATHIRSYFCAGYWCQDAEINQFSVEALVPNCLYLRAMDLAWSKIKSLPDSIGGLLHLRYLDLSYNEDLEVLPNSIAKLYNLQTLQLKGCKRLEGLPKHLSRLVKLQTLDIHGCNNVTYMPKGMGKLTCLHTLSKFIVGGEGSCSSWKQCFDGLEDLKALNNLKGHLEIQIRWPKNTTDAVKEDVTREGLYLNHKEHLNHIVVDFRCEEGGGRMDDEEARRLMEELRPHPYLENLAVKAYYGVKMPGWATLLPNLTELFLSDCGELENLPCLGNLDHLKVLRLSHLAKLEYIEEDSSSANFRCRPGPESAGLSLYFPSLERLELKRLCKLKGWRRGEGLGDDHQPFNESSSNTQVQLQLCLPQLKSLRIERCPLLTFMPLCPKTEKLHLVVFNERLRIVHAKRDENFYAPLHSSSSDPENPRNTIPIPMFREVYINNVAWLNSLPMEAFRCLTHMTIKNDEVESLGEVGEVFRSCSSSLRSLNITGCSNLRSVSGGLEHLTALEMLEIYDTHKLSLSEDPEGVVPWKSLHHSLSYLQLMNLPQLVNLPDSMQFLAALRTLSIVHCTKLQSVPDWMPRLTSLRKLMVSFCSAHLERRCQNPTGVDWPNIQHIPSIDVTSSLPKFLVLPYE

SEQ ID NO: 24 - DNA, 48 bp, Beta vulgaris
gaaggtgaccaagttcatgctgtttaatggcactatacctcgatcttt

SEQ ID NO: 25 - DNA, 45 bp, Beta vulgaris
gaaggtcggagtcaacggatttaatggcactatacctcgatcttc

SEQ ID NO: 26 - DNA, 141 bp, Beta vulgaris
  misc_feature (39)..(48): n is a, c, g, or t
ggatgatgtatggaatgagaatcctaatcaattgcgtdnnnnnnnnnnattcttcatgggaggtcraagsrgaaattggattstggtaactacgcgttcgcaygagacarcgagaattataagagatggtccattgcacaa

SEQ ID NO: 27 - DNA, 141 bp, Beta vulgaris
atttcctywtcacaaactaattgasttgcttaattgttaatcacatcaaacatttatagaagtaawtactraattcacatartccttattagaacaaaccaagaagtttcttggggggctttccagtggcgcgatacttag

SEQ ID NO: 28 - DNA, 141 bp, Beta vulgaris
aaaccaagaagtttcttggggggctttccagtggcgcgatacttagcagccatctcttccgctttcagaayatcttcagcacgtttggcttcaacygtagccttcttctcytctgcytccttgtgagtcatagccactttg

SEQ ID NO: 29 - DNA, 141 bp, Beta vulgaris
ccgaagcaggagttttttcagtggtggaaggaagaggggttgatacagggactaaacttttctcttccacygcaacygrtgattcccgggtttcygaaacygttgcygsyggttcttgyggcggagttaccggyggtgccg

SEQ ID NO: 30 - DNA, 141 bp, Beta vulgaris
  misc_feature (104)..(104): n is a, c, g, or t
ttgagaacctatgttcatctygagagaataaattgggggccaggagttagatataatttggtcatagagaywtgatcacgcctaactcctccaatcatgtactnagccaatctttacgaatgtcgaatgtgtaattgatct

SEQ ID NO: 31 - DNA, 141 bp, Beta vulgaris
tggttacgctcctgtcagttgtttccaagttctcacaraaggactggttatcaagctatgagacattgacygactatgtggtaaggactacatatatattatactctcttcataggttaggtgcacttatttattgtgaty

SEQ ID NO: 32 - DNA, 141 bp, Beta vulgaris
aattacggtttaagtcctaattacaagatctcatatggaagatctgcttctcttgtttcgacatcatcagwtcagttcggtcctatccgagctgtgcaagataatgtgggacctagaagactggtagacatcattcggact

SEQ ID NO: 33 - DNA, 141 bp, Beta vulgaris
tggaaagagaagtaatgttgattaatattatctctagtatctgctcaagtaccgcaagctratgctggtgygggtgcaatttcatccaagmctgcgaaatctagtcaacgtgaaactcagccggckagggttscagaaaat

SEQ ID NO: 34 - DNA, 141 bp, Beta vulgaris
  misc_feature (31)..(31): n is a, c, g, or t
aagtcaaaaagtttggagaagcaaaaaacgnaaaaaaaaragtagaagaaggtaaagctacagagtggagraggaggagagagaaagagagagacagagagaagcttcgattcagagttcctagatagtttgtggaacccc

SEQ ID NO: 35 - DNA, 141 bp, Beta vulgaris
tgtcgtcttcatcgggtgattttgggtcttccatgatcaattgagaaggatttttaggtwtakttcgattrttggagtttacgcgggtaattagatggagtaggagattagccaaatttgtagtttcgcacatgaattagg

SEQ ID NO: 36 - DNA, 141 bp, Beta vulgaris
tagctttagaaaaagctgggcctagattggaggaaattaaccagaggttgccttcacttgaggctgctgtyagacctatcagggctaatgaggatgcccttgtgtctgttgtgggccacattgaccgsgctgtcggccctg

SEQ ID NO: 37 - DNA, 141 bp, Beta vulgaris
cattttccgagaaagcggtgtatatysgtattactatcgttgccttttgtaacttgtctttttgttaatamgggaaataaaggcaatgaactctttgttctcagcagaacggttatgtgaatagcccaactcttgcttcta

SEQ ID NO: 38 - DNA, 141 bp, Beta vulgaris
atatattattacctgtgtcactcaaatttattggttgatgtcaattattctttgttttatatwattcatyytttttaatataataactttatataaatctaataatgtggaccaataatattaagtgggacatatataatg

SEQ ID NO: 39 - DNA, 141 bp, Beta vulgaris
agcgtgagctgaggcaatgsatgcaacgttgccaacagcgaccaggtggtcagtacgarcagaaggagtgkgtccaagagtgtcgagaggaatacggtgggagaggaagatgggtcgacgaaggtaattatgatgagttga

SEQ ID NO: 40 - DNA, 141 bp, Beta vulgaris
  misc_feature (84)..(84): n is a, c, g, or t
ttgcattcttcagcatgctttgcattacatcacaaatcagcccaatcttakswwymcwwygtccaacaacmaycactccaaswncatacacagatttcttaaaaacatcatgcaaggcaacactttaccctgagctwtgct

SEQ ID NO: 41 - DNA, 1155 bp, Artificial Sequence
  cDNA of TGB1 derived from Beet necrotic yellow vein virus
atggtccaagtacagcgtagaacgggcggcgacaagggcgcaaagggcaatcgtgcttccagcgcccccgtccgctcccgccggatgactcaggatgactggtcacgtacccatcccgacgatattttctcagttattgagaaaacactagtagaggatgggtataaatggaacggggtaaaacccggacattgcgattggggcaaattgaaggaatctggtgctattgataattttaggggtacattagaaggcgagttaggtaaaaattgtgatttgacttgtaatgctgctgccgttaaacttgacacattgcaaaaggtgaaaatgtcatcagattggactgccagagttggtattgttttgggtgctcctggtgttgggaaatctacctcgattaagaacttattagacaaatttggagcaaaacataaaatggtgttatgcttaccttttagtcagttgttagaaggagtgtttgctggtcggttggacacttttctggttgatgatttgttctgtaggtccgtgggatatggaaaatacaacaccatgcttgtagatgaggtcactcgtgtgcatatgtgtgagattttggtacttgccggacatttaggtgttaagaacgtgatatgttttggtgatccggcgcaagggttaaattataaggccggttctgccgtgaactataattttccgattattgctgaatgttatgctagtagacggttcggtaaggcgactgccgatctcattaattccagcaatggtggtggtaaacctgtagtcggtaataacgaggtaaaggatagttggacttttgaagaactatgtgggaagatactagatatgtctactgttttggtagctacacgcgaaacccaaaagtttctattagaagataatattgagtctattctttactcggacgcccacgggcaaacatacgacgttgtcactatcattttggaagacgagtttgatgatgctgccatttgcgacccaaatgttagggctgtcttgttaactagagctcgtaagggtggtatgattaagatgggtcctaacattgctgccaggttcaaaaacggtgattttaattcacgtggagttagtaagtcttgcaccggagatactttttgcgaagatagataa

SEQ ID NO: 42 - protein, 384 aa, Beet necrotic yellow vein mosaic virus
MVQVQRRTGGDKGAKGNRASSAPVRSRRMTQDDWSRTHPDDIFSVIEKTLVEDGYKWNGVKPGHCDWGKLKESGAIDNFRGTLEGELGKNCDLTCNAAAVKLDTLQKVKMSSDWTARVGIVLGAPGVGKSTSIKNLLDKFGAKHKMVLCLPFSQLLEGVFAGRLDTFLVDDLFCRSVGYGKYNTMLVDEVTRVHMCEILVLAGHLGVKNVICFGDPAQGLNYKAGSAVNYNFPIIAECYASRRFGKATADLINSSNGGGKPVVGNNEVKDSWTFEELCGKILDMSTVLVATRETQKFLLEDNIESILYSDAHGQTYDVVTIILEDEFDDAAICDPNVRAVLLTRARKGGMIKMGPNIAARFKNGDFNSRGVSKSCTGDTFCEDR

SEQ ID NO: 43 - protein, 382 aa, Beet soil-borne virus
MAPEQHKQNASETASGRRNSSVRSRGMSKDDWSVTHPDDVFSIIEKTLVEDGYKWHGVKPGHCDWDKLEQSGAIKNFKGTLEGEVDSSCSLTCNAAAIKLDIVERLDVSSDWSARVGIVLGAPGVGKSTSIKHILDTYGSRYKMVLCLPVKQLLDGVFSGRMDTFLIDDIFSRSVDYGKYHTMLVDEITRVHMCEVLVLAGYLGIKNVICFGDPAQGINFKAGSAVNYNFPVIAECYSSRRFGVATADLINSCNGGGKSVVGNNDVKDNWTFEELCGKIEEMSTVLVATHATKEFLADDGIEAVYYEDAQGMTYDVVTIVLKDEFDDDAICDSNVRAVLLTRARKGGLLKVDPNIAARFKNGDFNSRGVSKACTGDTFCEDR

SEQ ID NO: 44 - DNA, 633 bp, Artificial Sequence
  consensus of cDNA derived from haplotypes 2 to 5
atggcaacagaggaagcaaataaagtggtgaytgaaacaccggcaccaccggtaactccgccrcaagaaccgccrgcaacagtttcrgaaacccgggaatcaccrgttgcggtggaagagaaaagtttagtccctgtatcaacccctcttccttccaccactgaaaaaactcctgcttcggttgaaaaggttacagaattatctgaagaaaagcctctagaggaaaagccyatagaggagaagcctttagagggctcagttggtagagatgctcagctagcacgagttcaaactgagaagagratttcactgatcaaagcatgggaagaaagtgaaaaatgcaaggccgaaaacaaggcacacaagaaaattgctgctatcgaggcatgggagaacagcaagaaagcatctcttgaggcagagctgaaraagatcgaggaaagcttggaaaaraagaaggcagaatatgcagaaaaaatgaagaacaaagtggctatgactcacaaggaagcagaggagaagaaggctacggttgaagccaaacgtgctgaagatgttctgaaagcggaagagatggctgctaagtatcgcgccactggaaagccccccaagaaacttcttggtttgttctaa

SEQ ID NO: 45 - protein, 210 aa, Artificial Sequence
  consensus of protein derived from haplotypes 2 to 5
  MISC_FEATURE (11)..(11): Xaa is a threonine (T) or an isoleucine (I)
MATEEANKVVXETPAPPVTPPQEPPATVSETRESPVAVEEKSLVPVSTPLPSTTEKTPASVEKVTELSEEKPLEEKPIEEKPLEGSVGRDAQLARVQTEKRISLIKAWEESEKCKAENKAHKKIAAIEAWENSKKASLEAELKKIEESLEKKKAEYAEKMKNKVAMTHKEAEEKKATVEAKRAEDVLKAEEMAAKYRATGKPPKKLLGLF

SEQ ID NO: 46 - DNA, 636 bp, Artificial Sequence
  g23238.t1-HAP1-ORF of Figure 2
atggcaacagaggaagcaaataaagtggtgactgaaacaccggcaccaccggtaactccgccacaagaaccagcagcaacagtttcggaaacccgggaatcaccggttgcagtggaagagaaaagtttagtccctgtatcaacccctcttccttccaccactgaaaaaactcctgcttcggttgaaaaggttacagaattatctgaagaaaagactctagaggaaaagcccatagaggagaagcctttagagggctcagttggtagagatgctcagctagcacgagttcaaactgagaagaggatttcactgatcaaagcatgggaagaaagtgaaaaatgcaaggccgaaaacaaggcacacaagaaaattgctgctatcgaggcatgggagaacagcaagaaagcatctcttgaggcagagctgaaaaagatcgaggaaagcttggaaaaaaagaaggcagaatatgcagaaaaaatgaagaacaaagtggctatgactcacaaggaagcagaggagaagaaggctacggttgaagccaaacgtgctgaagatattctgaaagcggaagagatggctgctaagtatcgcgccactggaaagccccccaagaaacttcttggtttgttctaataa

SEQ ID NO: 47 - DNA, 636 bp, Artificial Sequence
  g23238.t1-HAP2-ORF of Figure 2
atggcaacagaggaagcaaataaagtggtgactgaaacaccggcaccaccggtaactccgccgcaagaaccgccagcaacagtttcagaaacccgggaatcaccggttgcggtggaagagaaaagtttagtccctgtatcaacccctcttccttccaccactgaaaaaactcctgcttcggttgaaaaggttacagaattatctgaagaaaagcctctagaggaaaagcctatagaggagaagcctttagagggctcagttggtagagatgctcagctagcacgagttcaaactgagaagagaatttcactgatcaaagcatgggaagaaagtgaaaaatgcaaggccgaaaacaaggcacacaagaaaattgctgctatcgaggcatgggagaacagcaagaaagcatctcttgaggcagagctgaaaaagatcgaggaaagcttggaaaaaaagaaggcagaatatgcagaaaaaatgaagaacaaagtggctatgactcacaaggaagcagaggagaagaaggctacggttgaagccaaacgtgctgaagatgttctgaaagcggaagagatggctgctaagtatcgcgccactggaaagccccccaagaaacttcttggtttgttctaataa

SEQ ID NO: 48 - DNA, 636 bp, Artificial Sequence
  g23238.t1-HAP3-ORF of Figure 2
atggcaacagaggaagcaaataaagtggtgactgaaacaccggcaccaccggtaactccgccacaagaaccgccagcaacagtttcagaaacccgggaatcaccggttgcggtggaagagaaaagtttagtccctgtatcaacccctcttccttccaccactgaaaaaactcctgcttcggttgaaaaggttacagaattatctgaagaaaagcctctagaggaaaagcccatagaggagaagcctttagagggctcagttggtagagatgctcagctagcacgagttcaaactgagaagaggatttcactgatcaaagcatgggaagaaagtgaaaaatgcaaggccgaaaacaaggcacacaagaaaattgctgctatcgaggcatgggagaacagcaagaaagcatctcttgaggcagagctgaaaaagatcgaggaaagcttggaaaaaaagaaggcagaatatgcagaaaaaatgaagaacaaagtggctatgactcacaaggaagcagaggagaagaaggctacggttgaagccaaacgtgctgaagatgttctgaaagcggaagagatggctgctaagtatcgcgccactggaaagccccccaagaaacttcttggtttgttctaataa

SEQ ID NO: 49 - DNA, 636 bp, Artificial Sequence
  g23238.t1-HAP4-ORF of Figure 2
atggcaacagaggaagcaaataaagtggtgattgaaacaccggcaccaccggtaactccgccgcaagaaccgccggcaacagtttcggaaacccgggaatcaccagttgcggtggaagagaaaagtttagtccctgtatcaacccctcttccttccaccactgaaaaaactcctgcttcggttgaaaaggttacagaattatctgaagaaaagcctctagaggaaaagcctatagaggagaagcctttagagggctcagttggtagagatgctcagctagcacgagttcaaactgagaagagaatttcactgatcaaagcatgggaagaaagtgaaaaatgcaaggccgaaaacaaggcacacaagaaaattgctgctatcgaggcatgggagaacagcaagaaagcatctcttgaggcagagctgaaaaagatcgaggaaagcttggaaaagaagaaggcagaatatgcagaaaaaatgaagaacaaagtggctatgactcacaaggaagcagaggagaagaaggctacggttgaagccaaacgtgctgaagatgttctgaaagcggaagagatggctgctaagtatcgcgccactggaaagccccccaagaaacttcttggtttgttctaataa

SEQ ID NO: 50 - DNA, 636 bp, Artificial Sequence
  g23238.t1-HAP5-ORF of Figure 2
atggcaacagaggaagcaaataaagtggtgactgaaacaccggcaccaccggtaactccgccgcaagaaccgccagcaacagtttcagaaacccgggaatcaccggttgcggtggaagagaaaagtttagtccctgtatcaacccctcttccttccaccactgaaaaaactcctgcttcggttgaaaaggttacagaattatctgaagaaaagcctctagaggaaaagcctatagaggagaagcctttagagggctcagttggtagagatgctcagctagcacgagttcaaactgagaagagaatttcactgatcaaagcatgggaagaaagtgaaaaatgcaaggccgaaaacaaggcacacaagaaaattgctgctatcgaggcatgggagaacagcaagaaagcatctcttgaggcagagctgaagaagatcgaggaaagcttggaaaaaaagaaggcagaatatgcagaaaaaatgaagaacaaagtggctatgactcacaaggaagcagaggagaagaaggctacggttgaagccaaacgtgctgaagatgttctgaaagcggaagagatggctgctaagtatcgcgccactggaaagccccccaagaaacttcttggtttgttctaataa

SEQ ID NO: 51 - DNA, 5009 bp, Beta vulgaris; identical to SEQ ID NO: 21

SEQ ID NO: 52 - protein, 1163 aa, Beta vulgaris; identical to SEQ ID NO: 22

SEQ ID NO: 53 - protein, 1177 aa, Beta vulgaris; identical to SEQ ID NO: 23

SEQ ID NO: 54 - DNA, 484125 bp, Beta vulgaris
aatattggaaagaaagccagttctcaagatgagggcgcttcaagcgttcctctctgcatggagaatatagcagcaaatgtactgacgtctcttagttttgcattcactacctgcattctggtaactttcttgacttatcctgcattattctggattttctttgtttaaaattcgattatatattatagtgtgaactgggaatagaggggagacttttttttcattagtgggcatggtcaagctgctttgatttatatatttttctatgttgttgtcatctctttttctagcatgcagctttcgtctgcacgacatatgcagcttttgttcatagtgtagtattcttggtcagtggtcttatttacttgtttatttctcatagcatgaagtcatttggtggacttgtttctaggttcgggtgtctttgtaacttcatcatagaggttgctttctgacctcttctgacataaaatgaatgcattgtactgtatgtgaataaacccctagacaattgttttgaaaagtaggactgcattattgttctttggttcaagtcaattaaggttgtttcgtgtatttccttcatgctttgcgcctttacgcttagcttgctagatatcgcagctctgaattataacctcttcttttgtgtttttttttaaaagatatttgagggagacatcaacttccttagtcctgtaatggaatcagcagatgaactgtatgcagcagcagctagtcttggcacttatttacagatcttctgttccaattcatttgagctgactgaagaaattatattgaattacattgggcattctgggaacatgtataaagggttactttctcgagttcctgaatcagagacactcgctgaatcattcctcactatgttcccttctattaatccactctcagcacatgcaattatcactagtggatgcgtgctcttggagttccttgagttgacagctgaagggagggtccaaatactcagaaaatatcatgtacctgatgaaagtgttgatcttttctctgccttgtgcaaatacggagaacgggaagaatccaagtctggagtgaccgactgttcttcctcggtatcttctcctcctgattcaggaaattttattggaagagtcaagtcagaaaatagaaaaagaaaatttgtttcaggttcctgtgatgctatgtatgacttcagatgttcaataccatccaacaactatgtagatggtgggttgatggatcagggagtgttgaagccatcgaaatcaaaggtctctggaagtcctagtaaatgtctacaagataagctgcccgacttcatgttggatgatcaactgtttcgtaatggagatgcaccagatactaccatatatatggatgcttctacaccatggcatgaaacaaatatcaccaaggcaccaaaaatttcccaaatgaaggatgattttgttagatctaccttacttgtgaatgatggattttccagtctacagaaatcaggtagcacagttaaaaactcacgagaagaaaaatcaatggacattttcaaggatctgcgtgaagattttgctggtgaagttgtagatattttcgacaattctttttttgatggggactttcaagtagatggaacaactgtgaagtcctctccaatggtctctaagactgtaaaagatcatgctcccacatatcataggactgccagaagattatcatttagtagcagcagtggtccggacatcccaatggctgatgcgatggatacaagttgtgggatagaagataatggacagttgagggcagataatttttttagtggggtagaatataactggagcaacatagactttgttgcccaagagcaacgtgaggggactggtagaagtatactggaaaaatccatgcaaaatgcaagtgaccaattatcagaaggaaagaatgtgccttcctacggggaaacaccgctctcgaaagctattctttcagggcaactgcgacaaggttcaccttggacaatagagtttctgaaccgtattaaggaaaagaggaggttacgtcagcagagccagccatgtgcttctgttccacgcactggttatcatgggaaagtcacaaaagccacaaagagaagaagcccatcaattcttgaatattacaaataccagagtaacagcacgcctagaaagttagctgagcagaaaaaggacaagaagcatgctcagctgcaaaatgagaagccttcaggattttacccaacttggactccaattgacaaaagagcaagacgggtatgttttgtcgtattaatggttttttttttccttcattttcctcttctgaaaatctaatttcatgaattgcagagtctatcttatgcaacaaatggaactggaagccaaactaagcttgtttggagtgataacaccacttgttgtcaggacagaaaattttcaggtcgagtatgagatatctgaagagtttctaatcatgacagtgtgtttagggagcatcatacattgattgtaagtaaaagactacaggtttgtcttgaaccttctgtaattaaatgagatttagagaaactacctattaattagattaggcattgtttgtggaaaggtttatcctaaacttcaacaaaccagaaatgtttgcaaaagttctacatacacgagaggataggagctacatttcagtgcttcatctataacttgtttgcatctgcatcaccctcgtaccaatatatcaggtttttaatgctccagctagatgtttgacaaagagacctaatcttatttgtttaatatctaacatttggaaaatgatcaatagactaggagtctatagggggaaagtaatattgactatctgcttatgcatgtgatcttagtttctgtttttcgaagagtgcatggtggtatacatgcatgtcatgattgacatccaatacaatgtaaactcattaacgtttgcaatgactttcaatctgaaatttttgcaaaagaatttgtgctatgcctaaatttttcgcattcattaggcaacagttacatgcttgtcagttgtgttatagagtaatttggatgttatgttcaacaattgcaagcacagatcaacttatttccatgatgatgcaagtttctgagagtatctttttttctttggcaaaagcctatcttgatttaatttttccataaattatgttaaggaaaatttgtcaataaataccatactttggacactcttttgaaataaatacataggttgtctaaaatttgatataaataccaagggtcactaattttttcggaatcattaccacttaacggaatcttgcaaaacacattaattttgctccgttagtggcacatgaaattacgattttacccttcctcaaccatcatcaccgccctaccacatgcgacaaccatgctttccaccgttgccaccaccatcacccctacttacccaaaaccacaacagactacaaaaccaccaccaccaccaccacctccactcactcaaagtcatcccaccccaacaccctaaccaagtacgaaactaccatcacctccacctatcaaaaaatcaacccaccacacgatactaaccaactacaaaaccaccacaccctcataatggtggttaggagagagaaaaggatcgcaagggtagtgagtttcgtggggttttagtggtcgtggtggtggaggagattaatggaaggtaagaaggtagtttcacagcatgccactaacgtagcaaaactaacggtttttcgaaaatctatgaagtggtagtgattccaaaaagaaatagcagatgttgctatttgtataaaatttcaaacaacctaggtatttatttcaaagaagtgctcaaatgtggaatttattaacaaaatttccttatgttaataggcttataaactttgaatatgcttgctgaagatattataatcatgataggactgaatatataatcaaatactaacttaactatttccagctgccagctccattcacacagggtatggcagatataggataggcctgatagggcattgtattttttgttggttattggacagtttttggctctttcaggacacttatttacttgattatttatctgatttccaagtgggccaagaggcatataataaacttaatatttgataaaagaatgttaataatgaaagtggttttgcttcttggcgcactatcgtaatcatcatatctgttaattgttttgatacacagagattggtgtttcttcttcatcttttatcctaaattctatcaggtattgaatagttacttcttttgaccattcctcaagttgcgtatggtcattacaagttgttgcctttcaccttcaacctctgcaaactttaggctcacatctgaatatttctcttgcatttctcttagctcatcttccattgttttgttcttatctttcagtaatgccacctctgttagtaaatcactggcttgagaatcagtgactttcttctctgtgcatgtgtctcttctgcacgagaaattttccagcataagcagaagttccatgtcaactaaaaagtacaacaaagtatgaattagaaaagtttgtgctctgcacctttcccctgatgttttgctggctccattttgcagtgacttggctgaagttgctgactgctgtgattttttccctgaaatttttctatcttccaccttgctaccactctcaggagatattccactgggtctgactgcctgtagattgacaatatgtttcttaattttagcttcaaatgtattattagtgatgctactcttgcacttgaaggagcaccataacttttcatggaagaatataaagccaaaggcacaaaaattgtaaaaacagaacgaaaatgaaaaaaaagcaaagataccatggtacacgactttctagtcttagaacgactttcatttgggggagaatatgaagaatgcttttgggactctaagcaagggatggaggtctaattgaatttagcaaaagaaccaaatgcaaaagtcattgaactcttcgataggcttgagtctctgatgatctagtcgagtcaagtgggttggagactggataaccctgtaattatatcttattgtttgaacctgagcttgtatatccattctcagtgttgcaagtcacttaatgtaatagtgttagctttggattaatggaagatactgagatttggaaaaacagccatctattgacttactagcttgaaaacttgtcgatagtacagcctcatacctaaggttaacagaggacatgagtctcagcctctcaggcatggaagtcatatgttgatatgtggtaatcaactctattaatgtacatatcatgacgtgcacttttgcgttatggtatttgcttctgtgataagtaatttctaggggaatggaaaaggaaagggcttgcacttatttcttgtttatttgtgaagaagaaagttatgctacagaataactctgcgtcttttatttctctcttttttttatttacaacagactctaatgcaacacttcatatctatatagctgcaagtaatgtgttttgagcctaaaattttgggtttagtgaagctttctgggaatctttcttttgtattataagacacctaagtacctgatacttcctttgcagaatgatggttgagctcttgaacatgatcttttgtcggaagttaaaaccagtagcactatggattagtaaccattgcctctaagaggcttctggctgggcagggaaagaggtcggggggaggggatgcagaatgacggtagagttctctaacatgatgttttgtcagaactcaagtttcggtaccactatgaattggtaacccattgcttctaagaggctggggagcaggagggggagggtttcaggtgtacacacagccttactcttcctaaaaggtttgttttcaggaccctaaattagacagctgtcactatcaatgagaaataacagacagttcagtggacatctgatgtagtccattgtatggtaacatgaaaactttgcgaataaaggcactggtaactggtaagaggtaatactgctgcaatgggatgtgtgatatcttgatatctaataaataaggaactaggacataaaaatatcaccttgagctgctttattttctccttaagagccgatacatccttggagctgctatccttgaacttctcaagatgtgctatttcatgatctttcttctgcagattttccttctgcctggctacttgctttttgaggttctcattatccaactttatatcagacaatcgggttttcaattcattgtgctgaacttggagtttttccaattgtagttgtacgccagccatagcatcttccttgtctttcgaggatcttaggactttgagctcctcttgtgcttgatttatctctgtcctcgccatggtatattttgtctctagctcttccctgtctgtctttgtttcttgaaaagacttcttcgtctcatcaagtagtgtcttcatttcttcaatcttgtttgtgaagtcataattgtcttctgtaagcctttctacttccatcctaagtgcttgattctcatttgacaaggcttcacatttttcctctactttctttctgctatacttaagctccacagtctcatctttgtgtgcaagtactagttgcgcaagtttgttctctttatcttttaattctgttgaaagccttcccacttcagctgtatatcgatcttgtaccaactgaagttccttattagctttctcaagatgttcttcgagagtagttgtatgaaggcgtagctccctagcctcagcttctgcctttgcagtcaaatcttcattttccttgaactttgtttctaattcttccgaaagttctcggaactcttcttgtagtctctgggctgcagaagcattatctagttttgtccttctcaaggtgtcttctgcatgaagggctctttgctcgagctcatctttggcatcagtcatttctttgagctcatcttcaaattctacttcctgtttttccagttcatacttcaaattgtttacttgcgtttcaaggtcgtgaatcacatctgaagattcacagaattcttctgcttgcttctgaattactttctccaaccttgctatctgacattcaagttcttccactttccgcatattatgtgtgcactctctttcctttttaatcagctctagttgcttctgattaaactttgaagagagatcatcagtatccttttttgcaatctcacaatctttagaaaactgtttgatctgcttttgaagggttttattctcttccacatggtcttccaattcaccttgcaggttttcgatcagttgttgcaacaaatgtacttctttagaatctctgtttgggcttggagcttcttctacttctctgtcaccaaacagttcaaattcagattttggttcctgaaatccttcggatgctctgtcgcttttcaattttttggtaagatcagccaactcagtctctttcttacctaacttttcttcaaggtccctcaccacaagaattaattctgaatttgaatcttgcgtccttcttagctgtgaacgaagagccctattcaaatcctttgtgtggactaggccttcttcaacttcattctggcgatgcctcgatttcttaccctcagttctcgtttcctttggatgttcagttccattttctcgattttgctctgatctgattttttcagttcctcttctgaatgcatctctttcctcttttagtctaaccactttccctgataattcttgtgccctttttgtttccttcacagcttgcctccttaatgacagtagctctatgtcagttacctctgcctgtctcttcaaagtaaaaatctctctttggagctgttcaacgagactcttaggaggttcttgctcttgttctcttagaaaattttctttagtatcctccacgtagttggtaatatcatcctctgaactccaatcgagcgttatgggctctcttgtttgatgttcgttgtgtgcaggactaggggttctaaatacaggtttgttagtgtaggctgattggtcactgctggtctcctgatgtgctctactttctttctgttcaaataaagaatttaaggtgtttccattccttgagttcctttcctcattgtctagagaatttgtgttgttgtaatcatcctgccatgtgagagagtgattaacttgagaaaggacatcaggtggtcttgtaatttcattctggaaattttctatcttggactatgtcataaaacggatatttagacatcaggtgacatacaagttgaagattagtagatcaaagactttactttgtgggcaacaaaattcatgtctccttctgatcgagagtttctgtcatgactttggaagctgccttcatcgatatttgatgctccagtgtcttcaatatccatctgaagctccctgagaataaagttagatgtatataatcatcttaatcaaatttctggcatgacagaaggctgggagcgcaacacttgatatgcttttgacattacctttgatcatcagctccttgcatattctgaatcatgacctgttttaaagtaattaccaattagagttaccttaggattacaattgatcagaaatataatgctgggaggctgtataatgtagatggtgcaaatatggtgtattcatctttaattagcagaaattctaatcttctcttctaaacgttaaagctatcttacttgttcacttcactttagtcctaagctttcatctctgatataagcaatgacacttagaactaccacattacagcaaaagtagatgcaaagagggtaactttctgcttacttgtcatatcggctgagaattctatacttaaaattatgcgaaatagggacaatattttcactctttatttctgtttcttttcgagttaatcggtctggggaaggactgatcagttgaatgctaagctaaataaggcacgaaatgtagagtgctcacatgtaaaattgctccagtgtttgaggacttaatcggcaaggagattgtggagggtgttgttgcctcgacatagtctgcaaggttaacaaaaacttctcccaagaaaccagcttttgatgatccctggcaatgttcaacagaagtttttaatgcagattgaagaaaaagccacaaatgacaagaacgcagaatattttcctaccgtggaaattataagctggtaaattttgtcgtgaagcttccctgtttttgtctcccttgtgaattttactgtttcgtatactggattttcccatgtgcagattccatcttgaaccgcagcttttcccaatcgaactgttggttggccaacatccactggaaccaaagatatcataagctttgatttggaacctggcacctgagaatccagaagtaaaacaatcaataatccgggtaaatcatatcttgaaatccctctatatttgatcacattatctgtcgtttgcaagtgtaaaatcataatataaacgattaattgttgatattgtttaaacacagcaaggggaaaaaagaaattgatgcaccaatgtcgtacaattctaatgtaatgtaatttcccaactcgagctcgttgaaataacagcacaaacagttcataatttgaaatcatatgcaagaaaattctagtggactggaaattttttcactaatgtgacttccttaaaatttctccacgattcacttcggggttagattgatacctgagttgcttgaaactgtaacatgaacacaactttgatcttttcatgcctccatcgccccaccttgaacatcttggaccctgaataactcaatttagaattcactcaacgaatgaagatcctgcaatattgtgtttctagttggtaattccccttgtgtttagttggtatatccccttctgtttactattctcgtacattggtagtgaagttctgatctgaagagatgtaaaggaacagagcaaatatggtatttagaaaagaatttcagagatctctttctcagtgaacttccttcctaagctacaagtttgaaaaataattgttgtttagtgaactacacaagtacacaactagtataacaaaatagaaattagttacaagttgtttaactttctgtcttcccgttttctctttgttcacctttggagatctagcctttcaacttttgatatttacataattaccctttcattacattgcttgcaatatgtggccccacccacccaggccatttgttaagtagagttaagtccttgaggtaaaagtattaatccaaaatgttaggtaaaaccaaaggaagccagttaccatcaggacaagaatggatatagctaaagaaagaagcttctgtatcattctctgatgaaaagttggatgttggctgtgagaacagcagctggatatcacgtgagttctgttgtttatataaagtgggcacgtgatgaggagccttcctagttagattataaatatcttaagttaaatataaaaatattagttcgattctcacaaatcttacttcaataatttattatggcattttatgcagatggtctgtctagtccatgtctcagtttgcctgtggttagcatttaattatcacaatgctgcgctgttcttggagtacattaaaagatcattttagtgtatccatcaaacatcagtatagtaattcaaaatttattattctccccttgtttttaagaggttggcagataatgtctattatacactactaaaagcttttgttcatttgaggaaattttttgtatttgagaaatgcaagtgaacaaaaaaaaatcttcactattttgggtttatctatttgtaaatactatctgatgtatgtaagagttgcgaagtgttaagattatagcccacacgtgagttaggaatagttgtgttacattaaagaattagagagagaatgactaacaatctaacatatagattggttggttactctacctatcatcaatggttttagaatggaatcctgccaaccttgtacgtggtcactctctcctctgacgtaagcttgtgtacagtttttatttttattataaaaactatggtgttgctcaaaagtttcatgtgaagacggtggtgatctgtttatgcaagatcatgccacctttgcagcattatgtgaaagacataagcactcagtccgttgacggaactttgatggttgagaaagctaaaaatatgactatatcagatacttcattatctttaagacaaaacaagtagttagcactttgtaggctggtagcacatggtaacatgtctgtcatacattagtgccagatcattattcaattacaatttcttacagcctatttgaactaaaggcccaccaaggcttatcaaagagagaaagtctttaattaggttgctactatctgtttttgtctagtattttccctgtctgtgcctttattttggaaagtcactgtaatatggacacctttatgtaaggattaaaggagtatcagatgaccttacttcctctctaatatatgattccgtcattttactttctcataaagggcaagaaagttctaaaaaaaaaatatcacatagagcaagatcgctctcttagacaatagcatggtggatgttctctactctagactcgaactcgaggttttttttagttttctcatgatcccctttcgaccctttagttgaatttttgttatctcccttatgttgagctaaccacctactcaattacattattaggttcagggcatttaatgtatttgtatattaaataacgacttaaaattattcattgatagatgttggtcttgattttaataacataggtccataactgacttcactttgtaaacatttaatttttgtacaatgtagattaatcaataatatatttgatccaaggaaaatatgacggggtagtatagaaaaatttgaagttcgaagaatcaaccttctgaaagtggcataattacttaggattgtccaaagttcaaatgtggtctaatgatggatgtagtatttaggtagtaataggcaatactcaacaggcacattcaattctattctgagtagtgagtactagtgcatggattataaccaaagttacaagcaacttttcatggtagagagcaagtttttccgtgtgcagttatggacagtaattgcctttatacacaactgctactaataatgttgtgtagaatgtagaggtagtaactagtaattatggtcctcttttagactaaatcaacgatatcataaagccatattatccataagtaatacaaaacatggtcaattggctcataatttgtcacactctccaaagcctatgttctatgataatatgatgggagatgcaaaagtttatagctttttgtgcactgaatcatactccactccactagtgtagcaacataagcatatcttcttccactatcaactggtgcccacactcctaatttttttttccttattcatgcctcatttgaattaagaaacaccttttattacttagatttacacgtccctacttaccagaaatatgttagtgctgactttaagtagtaacatctgacaacgtgctgggaacgcagctattttatcaagtatacaactctatcattaagtacatttctctatgtaattaagacattttagaacatgttcacgacgttcaaggtgtaagcttttaagggaatgtatcccttttgtgcagagaaagatgattttagcacttaattggtcttttaaccactgctcacttgcataagaaggaagtgggtttgatagagttgggccttctgctatgcaaataatatggttgttgctcataaaagatgatcggaactgttgttaatgatcatctacaatgtgtttgtcttgcattttccttaattctttttcactaaattatttggtttatttaaggtgaaggaatatgattttcttaaatgcccttatctttgctccctctttcttattcctaattaaggggaaatgtatctcttatctcattttccccagagtgacctaactcttgcatccaattacattgttttatttttatttttttataaaaaaaacttgttaatttcttcaaatagaattaactcttgatttgattttgtttgaagaataacattgaagggtatatttgctctttttaaagtagttttgacatgggaatgcaagctgcttgcacctttgagtaggtatcaagatatgcttttgtcagctttaaacctcacaggaaggtttgaaagtaccgaaaggaagacagagagatggtttagtgtacatgtgtaatatctcatcatttgggcccagctagataatgctatcaagttgggctttggatcacttaagggaggctgatagaatcttcagtatgtctggactgtgcttgaaaagttgggcctctttccaccccatggacaattcatgccttttttttttcttaatcaataataaaaaaacaacaatgcaacataaacaaagggattagtttaatggaacgtgttcaaataacatattatgtattaaatttcatatgatatagtcagttttttttatatagtcggtttttctgtgtgataaagtcagtttggattcacgataaaatattgtggtccacccaatatgttttggttttggagagcatggtgattataatttttttttttaaattagtcttttacatcatcagtcccaatgtaattcgtgcctgaacactttctctattcctctccggctctcttatatttgatccaataatctggcgtgaccctgtccacatcacttcccgaatatgtctccaaaacaacatactgctatattagatcagcagtagcacatattattcttaatatagtagatcacaaacccgagtatgtctccgagacaagataaatttgcaacaaacttattcaacattttaagaaatcaaatgattgtggcaggcacgtacgtcaaacaatccatgcaatgactaatggatggagtgccaaaataatctgagggtagatctcacaggttccaacttccaagagcaggtgacatcttttttatttattttttccataaagaaaaagaaaaccaatacatttgcttattgttttgtgttggtttacaggtaactctagcatcatcatctctttcatttgaccacgaaggataagttcatatttttatcccaagcgtggaaagatgatgttggtgttaagagcaactccgctgacatatgtggcacatgcactggcagtagtgtgtgcggtgatggtgttggtttggtgcagcagcttcagaggtggattggcctgggaatctcccaataaaagtctcatcttcaacgtaagctcttatgcaccttcaaattggagttattatatgtattattttcccttctaaatttgagcgcattttattatgagaccatacatgatataatgtatgtcgtagttggtacttatttttatagtggtaaagtatcacaagattgagattcaatttgtacaaaatattgtgagacatccttggcatcatcgtccattcacatggtaatactgtaatgtagacatttgatgacacaagcattatgggacgccacttgctttcacttagaaggtcctattgagctatatggtgggttagacccaatttttgtgcccaaaaaggggatacaaggaaaagaagaggggggaggtcaaaaagaaaactttgttatgtaagtttttagagttggtatggtagattttatcaacccatacagcatttgcttatttctttcaggaagtgtacttatggatttgaggctgaagagttgggatatcattaacctaaagactaaagtcatcataaattcataactatatgcaatgcaggtacctaaaataaaatcctgagcttgtgcactattcgtctattcacgtatacatctcgtctagttcactcctgagtcctgactcacttcctgacataaatattactaggataaagaatctaaaagtactgtacagactttggccctgtcacttatcatccacaagttaattaacttcacaacattatgtgaaaattctttgttaattttcataattagctgatctttctgaatttcgatgataaatgtacataaatatgctaccaatgctatatgtttatatgataaagcaagcttgatgatgacaatcattaatctgtatggtgtttgatacttcttcttctgacagattcatccggtgctgatgttgattggtttcatcataattgggggtgaaggtaatcacttaagctgatatttgattgttcactaatgaataaacatccttagttctaattattatatgcttgttcaatttaatgtaaaatgcagcaattataagctacaaatctctccccttgaggaaagatgtaaagaaagtgattcatctagtgctgcatgcaattgcattaattcttggaatcgtcggtatttgggctgctttcaagttccactatgagagctcaatccccaacttgtacagcttgcactcttggctcggtatgggcgttattgttctatatggcctccaggtaaatccagtccagtctatatcgtccctgtttaaactgatagttctcttgcatgcttgtaaaaattttctttgaagatcaaaagactaaatgatcaattcacgtttagtcattgcttatcgaaaaatgaattgtttattactactatgagcttgctgcgttccatttaagctttgttttggttaaaaggataacattttatggaaatttcacggaattttgtatgacagtaagatgataaatggagggaaggagaggaggaaattgaggaacaaccatgaatagaattattattgttctggtttcctgatcatagtggctctgtatattcctgggaatgatgtaagatgcgtttctttttttgcagtggatatacggcttaggagtattcttctaccctgggggatcaactccgatgagacgcgctttgcttccatggcatgtgctgattgggatgttcgtgtatgttttagctgttgcaaatgcagccatagggttcttggagaagctcactttcctggaggctgcaggccttgaaaaatatggttcagaggcttatcttgtcaacttcactgctattgccactatcctttatggtacctttgtttttctaacagtgtatgctaaaaatgatcaagagtgtgatgacggtttaagtagctgaacttgacaaaataaagtatcaataaggaaactttgttaagcactccctattaattttcacttgtcaaaaacagcaacctaataagaaatatcacaattttaatcttgtatggttgtaattttttggatgtaattacctacattaatatctaggagtggctgaaggatatctcttgaaaaatgtaatatatttgatactcaattttgttttgtttgtctgcatgaaagtacattaagatcgtagtacctaatgtaatatgttggacattaattttaggccttgatcatgaaatggatatactaagggacttgttagatgccaccctaaaatctcagattcttgtccaatcttttaacatttttttcgatcatatccctatttacatttactcagcccctctcactctctcatcaaacaccaccaaacctccactagtagaactaccatgactaacaccacatacaccttttggccaccccttgtcaggcactattaccggtctctttataccagaaaaatgccttcttcaaatcttcattcacaacgtcaatcataaggagagagaattcagaagagtggagtacgaggagtgaataaggggagggtatttttgcccaaagtagggagacgtttggagatttaagaaccacttttattgccactatttaaaaagttttggctaagcaaataacataactagtaaacttcgtgctaggagatgcacaacttatagatgtactccttggatcacaaagagctaaaaggcaaaggaattcataaagttatgtaatctcaacaggtaatctcatttcttaattcatagactatcatcgagtgggctccgctaaggaaaaatgaataatattttaatcgtgtgcttggagtataaagtactatgtattatactttataggataaatcgcatcttaccacctagacttttcacgtttttagaaacttccaccttaatgaattttttttataaatttccacttaccattttcaattttattaaaaactcccaccacttaacgatttttgttaaattccattaataaaactgttaagtggatccctcatatacatttttttaacaaaaccgaacttgaaatagttgcaagtctctacaaatagttataattcgttccaaacttgctccaaaattgttgagattttgcctttaaattgaggaaattgactttgatttcaacgtaaattaataataaaatgcatacgtgaggtctacttaacggttttgttaacgaaatttaacaaaaatcgttaagaagtgggagtttttaataaaattggaaatggtaggtggaaatttataaaaaaaattcattaaggtgggagtttctaaaaacgtgaaaagtctaggtggtaagatgcgatttatcctataaagtataatacatagtactttatactccaagcacacgattaaaatattattcatttttccttagcggagcccactcgatgatagtctatgaaataagaaatgagattacctgttgagattacataactttatgaattcctttgccttttagctctttgtgatccaaggagtacatctataagttgtgcatctcctagcacgaagtttactagttatgttatttgcttagccaaaactttttaaatagtgagcagctaaaggtggttcttaaatctccaaacgtctccctactttgggcaaaaataccctccccttattcactcctcgtactccactcttctgaattctctctccttatgattgacattgtgaatgaagatttgaagaaggcatttttctggtataaagagaccggtaatagtgcctgacaaggggtggccaaaaggtgtatgtggtgttagtcatggtagttctactagtggaggtttattgaatatttgaattactagtaaagagtagatctcgcctccattttctttaaaatggaacattcaattattttaattcactcacacaaatatttcatattaaaaaacctaaaaagcataacacaagtgcttattttattcaccatctttgttacaatgatgattatcaacctcaaaatcaaccaaatcttttttcacaaaaacatcacatgaacaaataaaaatacaacatcctctaaatctttatgaaatcacactgaaaattttcagaaaaagatcgggtgatgctaaaatgaacacatcaactccctattcatcaccaactcaaactccatccatttcaattcaattaggtaagacttgaggcgggtggcacaggacataaacacacacgaattctaaaccttgtaggcccaagaccaatagtacttatcctaaatttaatcatgtgggccctctcgtaaactattccacgtagtccaatccaataaatcttatttttcattttcctttaaatctttttttttcagacggccaagattgcaagtttccaaagaaagtttttttttttttttggaatttcataagtccaaatatcctgtgagagaagaacgataaaacccaattttatctaacgactttctgagttcccatctttttattgtctagggaaaaaactaaaacgaagaagagagagaaaaagaagagagagaaagaatggcgggagagataaaagcaactccattgacgtttgtggtacacgcgcttgcagtggcgtgtgcggtgatggtattagtttggtgtatccattttagaggtggtttggcatgggaagctaccaataaaggcctcatcttcaatgtatgttcttctttctaatttcatcctaccttttttttcttctttttggggctttttttattggcgcaaatttattggaatactggaaaattttgtcattaattttttttttgttttttcttaaaaaaaaaaagaaaaaaagttgacttactaggtgatttgcaaatggcaattgatcataaaaagaaagtatttcccaaagtataggagtgaaatgagtattttatcatgttatttttagatgaactaaaaaaaattacattatggtaatgaaattaattaattaattatgttgcataactgctaaattgaattgaattgaaataaatagtgacacgtgagagtaaaagtatttgtccagagctacatcgaactaaattgaagtaaaaataagttggggagaacaagcccatattcaatttcaacatcacggtgattttttttttccgaattagaggaagataatgtaaatgaaagtttctaattaaggaatgggtccattagttagtttcatttgcttatttctctaattctttcataagcataattgtagttggtttgggcttgatataaatgtacaagtgacaataaattagacacatgcttctaaatttgtttctaataatgtagtatgttataatagtacaactctttaaattgataggttcataattgcattgatagtttgagaaaaaatattttaggccaacatgtttgatgggttttggaatttacacacaatatattaagacctgtaaataactaactaaataggttgttggtaagaagaatatgaatactccctccgtcccataatatagtgcctacttcatttttggtgggtcaaactttaaattctttgaccgaatattctcatttgtatatataaaaaaacatattcatgtgggatcttgttagattcgtctcaatgtgtagtttcataatatcaactttttatattttttattaatacagaattgaagatattaaaggtcaaagttacgtcttggagatcgtgtaaaaaagaaacaagcactatattatgggactagtatacaataaaagagtttgtgcactttaaactttctaacctacaactccactgtccactccatcaaatgatgggtgaaaaacaaatttctttgtttttcttttatacggtctcgaaaataaatatttaactttttaatatattcaattctttattaataaaaaatataaaaagttgatattatgaaactacacatcagaataaatctaacaagattccacatgaatatatttttttatgtatataaatgaaaatattttatcaacgattttagagtttgaccttaagaaagagaaacaaacactatattatgaaatgaagggaatatctgatttctaatttctaatttctagacatttctttagatacacatattgagaagattataagttgattttaatggagtgtatgaaaagataagacgtgtcatcaatacctatcttgcaataagagtgtaattggctgctttgattgatcctgtatcactccatctttttaatattgggtatggtgggaatacaagtgctgtcttcgacctgccttttgtctgattaatgtgaaacgtttaagtcgtggaattggtcaagcagtaaatttattaataaataacttagtagttagtactgcttttgatttgtattttgttcaatttggaagttagtgattgactctgaagctcacctttacaatgttctaatttctaacctaccttgctcgtatttgtccctccttgtagtctatgttcatttttcgtggtcttgtgctttgacaatagaatgtggactataaaactatattaatgtctcgtgtctattaagcgagttcactcatggtacactcgggtgtaccatgagcatggtacatccaggggtatttttgtaataaattagaacttcaggtgctcatttgacaccaaatttgctcatgtgggtattttggtttatttactcatttgctcgttttgctcattttgtaataaaagtgtttgctcatttttttaaatgagtagaaatatttgttcatttgttcattttgctcatttgctcattcgctcattttgctcatttggagaaaatagtgttgggtgtaccatgagcatggtacacccaggtatactataaatattctcctattaagcatgttataccactaataacttgtttagtaataggtcatcaataatggtaagtatgatgttaattggcatgagaaatattttgtcgatatctatgacagtgctattttattttaaaatatatatttttctcaaaattttataaaaattgtcacttaaaaatatggtattgagtaggaatgaaaattcaaaaaaaaaacaatgtcatatgtttgaaaaatgggattcaattaccgtgataaagaggaaggagtttttacttgcaaattacatatgaattattatcattaccatcatttagtattacctacttaatagtaagagttaaataattatctcttccatcagttccatgctaaataatttcaacatttgatttcacaattcatcaaattagacttttttttctgttcaaatataataaaataaagtagaattatttttattaaataatgattatacatattaatgatcaaataattcagaaatgttaaagtagtagtactgtaaagtggttagtcatgctaagagcctaaaagtggttagtcatctaaggaggctgcattagtttaatatgcctaatcaaggtcagtgatatatactagtgaattcattaatgaaataattttatgattgagaatatatgtaatgtggagcatatatgtgagtcactttgaattatttatttcagattggagatatacattgaacaaatacagttcatgcataattcaaatgatttgcttttcttaatatcaattgatttgtaatgggattaataatgggatttcacttcaagttttacttaattgactcgtgtttcactctttattgcttggtgctacttgttaaacagtgtggcattactacaaattttatctacattcgagtgtatcgtgagcatggtatacctattccggggtatttttttgctcattgcttatttggaatcatccaaatgaacaaaatgtattaaaaaagagagttttaaatgacaaaatgaacagaaattagttttacgtgtaccatgtatgatcaatgaactcgtggaattaccactcatccttaatctaatttttgttgttttgatagattcatcctgtcctgatgttgattggtttcatcatacttggaggtgaaggtaatcatgtagaataatactatgaccaatctctaacttattgtttaaccacaagttagtttttctatttttcctaatgctgattatattttaattgcagcaattgtaagctacaaatctttgccgttaaagaaagatgtgaagaaagtgattcatctagtgttgcatgctattgcactaattcttggaattgttggtatatgggctgctttcaagttccacaatgagagtgcaatccttaatttatacagcttgcactcatggcttgggattggcatcattgtcctctatggcattcaggtatatttacttcatattagtatttggcagcttattacatagtagtataactgaattacccagcaaaatgtccccaacaatgagcatgtgtttccgagtacataaattgtgttggggtaaacaataattgactatcacgtaaagaaaataattactattaccaagcaattcttggtataatagtaaaaatttgatctcgtgacttaaaacttaaaagattccgatattaaatacgctctctcgaagggaggctcaggctcccttatcgacaaaggatacactatggcagcctggcaggggctcattcgttaggagtaaatgtcctcgtgctttaaagaaagtacttcattacgtgaaccaatttttctgttctgtggtagtcacatggaaaacttctgggctcaaattcgtgcccaacgataccaatatgggcccatgcgtttttagaacatctgggcccataataggttaaactgataaaataccaaaactctcattttgcatcatcatataggtggactgtcatcatggttgttgtcatgtgtggaattgtggttatatatctctatcttcaccttttgagaaagtctcatatcatacttcatttcaatatattcgttcaatacatttttataacatttcttatataaaagtgattagcggaaactaaatcttattctaaaagtaaggttgcattattatggattttaatataaattattctcataaagttataactttatttattacgtggatgttatctagtttacttggtaaagtcttatgtggatgatatctaatatttgagatcaaataccatctaccgcgcttagctgttcatttagaccaaacaactttgtttattataaccgtctattttacaataccaccgtgtagtcaatggcagatcttcataaggaaggtctgggcctaggcctggcccccataagttttttttttttaaatgaagccttgtagtttaaagtccaaaacccagcatacaaaaacaagttatacagcatcagaatatgttattgtggaaaaatctggtcctgtaacaaacctttcgagatccgccactgcgtgtagtaattttttccggcttcctaatttggtacgatttggtgggataatcttgcagtggatatacggatttgtgatattcttctacccaggagggaactcttctttgagaagcgagtcactcccatggcatgttctcttcggaatatttgtgtatggattagccgtcgcaaatgcagcaataggatttcttgagaagcttacattccttcaaagtgctggccttgataaatttggtgcagaggcatatctcgttaacttcactgccattgccactgtattgtatggtgcctttgttttgctcacggtgcgtgctcaaaaggatcaggagtctactgaggattatggtacctattcagctatttgaaattatggaatattatgaagaatgtcattattatttataaaatggtcatctcccttgtgtattattctaggtatctatgtatattattgaattgtatcttttctaaattggagaatttgttaacttgtgatgtgaactataaatgtactcttgttggtttctatttttagattatggtggacatgatgtatgacttatgaggaccgttcatactggcttacatacattaatacagttgttgttgcaaaaagtttacgttgctaatctcaatatgtaatagactctacattcggcactgacaatcagaatcctgaattgttggggtctgacctgattggtcgtggatatactcggaacctgtttgagaacttgttttgacactattaattctaatacaaattcatagatatgttgagttttagtggcgcatggttcataaagtttatcattattcaacagttgtataatgtggttgttaattatgaactacttttatctcattttctaatactagttttcaatttgttataagtatttgtaaaaaagtagatataccattagtaatttatctaattaattatgagatcatagattcatagtaaagtaaggccagaaatgaaatctcacctaatttgggttaccatcatgggaatttagtgggaatcgctccgataattagcattttaagaacaatcaaacaagaataatagattagtttaataccctattacctaatgctagagtctagcatggacctgatccacattaacattacggttatttcactattatatccctttaaaaaaaaaaattcatcatataccctttcgactttgaaattcaccatgtaccaccgacgttttaaaaaataaattcacttgcccttaatgactaacgggtcgtaatccaattgtattttagctagccgaaacatcttaaaaaaaggggttgcattggaagaaattttggtggctttgtaacgcccaaatttgatccctccttatcccctttttaactattgcttatccacaaacttgttagccgtactggtagcttttagtggttggtgtttagctgttagctattaaagtagtggtataaaacattgatgttcggtaaaagaaggcggagtagttgtttacaagttaaaaactcaaagaaaacttaaatatgaaatttatactccattaaatactaccccaaaaactacaaattataatttttgacaaacactactaaaacactatttccaccataaaagctactcatactactacctaaccaaacactcctgtttttcataattagtgttttaacttagcttgcgacatacaggcccatagtgacctctactttgacatagcgatctttttttcataacatatattctagtggttcatgcatgtgtttatgtaacaccgcgacaattctctattttcaaaaatacttttttaatataaaacttagagaattatcaaagtattatcgtccgtgtgataatgtatcagcttattcagaattttgcaatggaaataataataaataacttttaaacgtaaaacttagtcaaccaaaaagtcaactccaaaagtcaaaccaacaaaggtcaaaagtcaacctcaaaagtaaaagtcaactagaaaatgtaaagtcaagtataaaatgataaaagtcaacacaagctctccaaattcccaaacccataattcatcatcttcaaacttgtaatcgacgatgctctattgatcccgagagattgatcaccgaatggggcatcacaggatcaaaaaggcatatgatcaacacatacacacaaagtacataatcaataaagctgagtactacatggtatatacatataaaacctaacatgatactaataattaagcaagaataaataataataataataataataataataataataataataataataataataataataataataataataataataataataataataataataacaacaacaacaacaacagcaacaacatagcagactacttttactgaactaaactccataaccaataagttaattaaattagatggaatagtcaatgaaacgagttgtccaaagcaaaccagtcttcaacttagaatataaagtacgggtgcgactccatactccccctgacctaagatatcgaggaaccttttaaataaaaactagtttttaagaacgggtttttgccccgagtacttatatgtttcatctattaataattcaattttgaaatgattacaccatatatcactagtggtaaatgtatcttaatttttattaatagatcatttggtcctttgaacttcacctcctgattcgtattctcgaataacaacaataagatttgattagcatcaagaataatttgtaacgctaccctattaattacgaagtagaggattctaattaacgatcatggtgagttccgaaaggaaagatggatcaagggtatgactgcaaaaaaaaaaaaaatcaaacaagaaaaatcaactttatggctagagcctagaaataggcattaactgccacattactaattacaacacatatctataattttttgaaaacatgaatcactacaagatgttagattagatgataaatttttgaaaatccttacttgaggtcaggggttcgagcccaaacttcaacatatatatatttttaaaaaagtaataatcacctgacttattgttggttaagacatatggcaacattctagtggcagattaagggtgtcacgtggcgcatacacgttatcaagcatgccttttaatatatttgtatagaaatagatagatagatagataggacatggtgatcaattcagtcccaagaaaagccatgggctaccaccatatactccaactcatactagtccaacacctcagacgtgcacaagtctaaagctattgctattcacgtttcactttacataattaataatttattacttattatgactcacaaaataagataaataatataatcatcaaagaatcatagaatttcatttttatcttaggattagataaggtgatcatcaacttaattaacaactgaagattaattccaacattaaatccataaccttttatttatttgaggtcaaataagtttcaatcagattcaataaggtccaatatgttccaataaggttcaaatagtcaatgatcaataaattaaaattaaaattttaattaaagtaccactatgattattatatagtgatatatttgtattattgtctagtatatattattcatattattattagctatgttattatttaaaaaaaatatataaaaagtgccactttgattatatagtattatatttgtattattctctattatttaattattcatatcactattacataattatattattattaaaaattatcatacatggtcaaataagattaacaataataattatcataatcataaatattttacaattcgtctttaaataactataaataaaatgttttcattactaataacaatgaaagatataaatgttattaattgattttatactagtgctttatgaaatcaaagcaagactattaaatatattagtagtgaaaattgtgtatagacaagcatataaatattatttctttttgttaaaatgttaattataagagataattaataattactattttttcgaatgataaattttaataattattatgtcataataaattttttgagggataatatttgtgtcaggggtaatatttatgtaattactcatcaaattttctgtcacataagtttcaatcaggtctaataaggtctagtaagtttcaatcaaatccaatcaagtctaataagttccaatcaggtcaataagtttcaatcatgtttaataagtttcaattaggtttaatcaggtccaatacgttgaatcaagtccaatcaggtctaataagatcagtttagtacagggttattcaggtgaagagaacgcacccttaaggatacatgtatgaaattgactctatttttgtgaaacgtttctataataaggaataactatatgttagaaagccgcaaatgtgactatgtctaaacatatacttattataagttatagtatacttcccgtgtttcaacatagatgacgtggtttaacttttgtactatttacactcactcctttgatcatgttttatgatttttacgtttgaaaaatatatttatgtcggatattattagattcatcttgatatatattttcaaaatattaactttttataattattatatgtagggagttagatatattaatagttaagtttctgcgttggcaagtgcgtccggaattgtgtctcaagtatgttgaaacgaaggaagtatatatgtcattacaaaggtcacgatgtataaaaaagtgattgcatttacatatgggtcactatgtgttccacgtacaatatttgacatgcataaccttttaatccacaataacattattacaatttgcaaaccaggtcaacataaatcttactctaaactattaaacatggggaaaatcaagtaattaacatattccttttaacttcaccccaaaagataaacatttttcttagtggtcgtttggtaaataggaaattatgtaggcaatagaaattcccatgattttcatatttgtgtagttgtttagttgacagatagtgaggaaaacgggggcaatgcaaattcatgagaatttgaaattcccacaaaatatacgaatttatttacttactcttcccttggtcactcacaattgctacataaattcttatgaattacaactttcctactaccaaacaatttaaactaatttataggaatttcataaaggaattaattttctacaaattgtaaattcctatagaaatttaattcccattgcaaccaaacaaacactaacactccgagagaaccaacaatccaactcccgatcctaaaaccataactacaagctatttttactactctattccttttaatataatcatgattcattatcactagcctttacaaattacaatattagtaacagtggattattttccaataaaaaagaatgattaatgtgtgattttgttataagttcttaaaactaatatggtttatgctcgtgtgcaatcattatcctatttttgcaacaaaatgctaagagtttttgggttcaatggtatcacttcctattttctatatggaaaattaaggatcaaaatttggtggaagcataatttcaatgttgtctggggtggggattgggtagaggtgatcattttggcccggcccgtttttgggccgggttttgggcagaatttttcggcccgcgggccgggccgggcccggtcgtttttttgtttttgggcgggctttgggcaagctaaaaacgactttttagtctattttttggccggcccgttttggcccgcaaaagcccgctaagcccggcccgaaatagcgggctttggacacaaaaattcggcccgaatttaggcccggcccggccaatgggcaaatttttttggccgcggcccggcccatgatcacctctaggattcgggtacttgttggacatctgggtgagagtcttgtgcaagaacaacccaaaagtaaattcttcttaccatgtggtttccgaaaggaggcccaaaaaaatcaacaaaataacaaaaaacaaagatcaatgacaactactttttatttttggtgtaaaggaggatcaacgtaataatcttgtcgagtttgatcccaagtcttaactcttaagtattattccacgagatattactaactaggactgttctctaattctcttcaccattaagttcaaataatatctaactaaaactaatacaatacttaaaaataagtttcgataagattgaatctggtctaattaattcaattcaaataagttcggattttttgagatgaaaacaacgctaccttggcatccacaagaatgacaactatgaaaaggtcattttggctctattatttttggtttgattgcttgcaccaactctcaactctctagtctctcctcgttcttattcattccagctaatgaagctgctatcgttatcataaacttccctctaactcctttctaacttcccttccactactcttcttcattttctctctcctccctcctttcttttcttcctcttttttctaggaacttcacaattaaaaaaacttaaatatacttggaagtacttttgattgtaatacatatggcaacagaggaagcaaataaagtggtgactgaaacaccggcaccaccggtaactccgccgcaagaaccgccagcaacagtttcagaaacccgggaatcaccggttgcggtggaagagaaaagtttagtccctgtatcaacccctcttccttccaccactgaaaaaactcctgcttcggttgaaagttagttaacaattttttttttaattatctataattttaattattattatatgatgatcattatattatagtatatggctaattttgctttattcaagaatatttagtgatttaagggcttttagaataattagtgagatttagttagttttttcccctgtgatataaagatgggtcatgggtggtagttttctgttttccaattatatatttttactatttttggtggatgggtgtttttatttttccttaatttggtattttttctgcatattatccatgtttgttaaggagattacttgcttattttaagaatatcatgagtgttatttgggaatattagggacttatcttagggctttttctggatcatgaggtttgaagtaaagtggttgggcacttttatagtatattcaaaactatttttttcgcttattgctcatttaaacgatttcaaatgagcaaataacaactataattgaagaaattagcctaagctcatggtatgcctgagtgtatggtgtataatttgattatcttagactttcttgtgcgttgcgcagtgattaaagagtaaaggcaattccagctaattttggttatactaagcttttttaatgctaattgatcctttgttactttgtccgttgatgataaacctatgtaagcaaagtgcactattcatgaatcatgatactggcctggccattagctattatctatgttacttagacacacggattgggtgtctactcggatgtgggtgtccaaagtgtctgactcggctattttggaaaaaagtctaagtttccggtttaaaatgaagtatacaattaaagtgtcatgtcggacacgacacgacacgacaccccgtttttgaggtaaatgaaggtgtcggagtaacacatgctattatcattcatcaaacagaaattagaagctattacatctttaactatacttggacaaccacctagctatacacgagtcgggaactcaattagagtaaggtgagccatatgagccgctaagttggctgtctataatcatgaataaacctaactaaattaaaagaactagtaagagatcaggtatccttaacaaccatatctgcataagattcatcacacttgttttcattaatcatctttactacctgcaggcaattactttcaattataatatcccacgcatagcattgggtagccattttcattccgagcactatagccttcccttctgtcacattcgtttcccacaagtgtttcactttttgacacgccatatgaaaaatatgcccaccatgatctcgtataacaattcccattccgattcccacctccttaaagatcgcagcgtctacattgattttcagcacattatagcttggacagcaccacaccacactagagtgctgcccaccagtctgatctgcagcaggcagactcatgtgtatgctgtccttcccctctgtaccagccagttcaaaggcagctggtgctgtacacagttctggaaggtgacgggcaatgctgccatgataaacattgttccgttcattccaaaccatccatgccagtattgcaactttacaactctcctcctataaaacatccatccaccatgcaacccagtcactagcgcatcatattgggattccagaatactctccaacccgcctcttccgaaaggatactgggtatttcttaatcactatttctaaatcaacgcaagggtgtttgttacataaatctttacaattcttgcatagcatttccttatgtaaatgaacatgctcaaaatgttttatcaaactatttttgttaaacatataatagaatttcccttgaagtaccaatgatgtgcacagtatcagcgggagctcaaaagttgcaaaagcttagctatgatgatgctataaacttaagagtatataccaggttattatttataaactaaagttgagtcttaaggtgggttgaacttggaattttgtgctcaaagacactcgagctcaaattactacaaggcacaagctgagttgtgatatcccaagtttaagctgtctttaacacccctacctataacctatgcacgactgttgctatttactgttttcttggttcataaggagcctagagggcaatgatgcacatggttggaaactttgttcttgtgtttcagtgtatcactacattaaaaaaatttcatccgagctagccaatgtatgctcattatatcttgtaataaatacagctatcacttacttttttctatctgagattgtttgctagattatgactttggactagcagtatcgcaaaatgcgtataaatgaaatcaaagactcatttttatctcataattttctctttaaatttgtattttcattcagcgtgtgttaattggcttcaaatttaaaattattcactttttattgacctcttttttttagaggattcacttttattaactagtacactgtatctgatggacagaggttacagaattatctgaagaaaagcctctagaggaaaagcctatagaggagaagcctttagagggctcagttggtagaggtaatagtttcactcatcttgttgtaaacgagcttaataagttcagtttcagcttatatcttattgttgttgtattcagatgctcagctagcacgagttcaaactgagaagagaatttcactgatcaaagcatgggaagaaagtgaaaaatgcaaggccgaaaacaagtaagagtactttgtatggatatgattagatattagtactacacccacaggctatacaaatatacattatcatgtcatttagagatcacatactcaaaatagcaatgggaatctcaggggtgcttgaaccatgagtgaattatttggcttaagttgttttttggtgctaaagaatatgagactcctagcaagaaaagaagaatctaataagtcttaactccaccattgcaaggtcgttaacaatagaaaaactcttgtgacttaatttaagttaaccaagcgataggtaggcctcatgccaagttacaagatttttcacacatacgcgtgacaaatatagctgtctagcttgctcttaacaataagcttggcgaggttcttaagtggtttgtcacattgctcgtaccaaccagtatcactcttgtcacctgtcaatgcatcaattagctctccctatatacttgctggacctgggataaccattatatactctgtattaattctttgtattatacttgaataggtctaaaggccaacatttgggttagtctctagaagttgctggagtaaatttgtgcctatagttgaatggttccgtgcttaaaccttccctttgaatatcgctaagagttcagtctttggagcatcacatcgaccatatatttagctgagtaagcgctgatacaattgcttaagcgctccttcccctactgttcagcaactcttggactgcctcatcctttgcatcagtgaacgtatgttgagtagtttaatcctttccatcattccatgactcctttaaccctcatccactctagccaaaaacaaaatcaaatttgttgtgtgattttgatggttgagaatttgagatacaaaatagccttttgcctcctttaccataaccaccgtattgtcaatttgttataagacccatatgactcattagcctatatgggaaagtcttagatcaatttactcattctgtttccatttgttcttgcttcaaattagaggtggttattggacagggtagtccaatggttaaagggttagggtcaattttacagggcttttattggtcagggttttattggacagggtcattattggatagggtcattatagggtcaacaaagaaacccaataattttaaaaaataaaattagttttgtaaaaacaattacatattcggattcgcattcatttatacttacttttggctctttttgttccttgtttttcttgctcgtttaccgacccacccattatcgacccgctataagccctctacccatttggcccgacctgctaccgaccctttatgaggcgaccctcttatgacccaaacccgcttctgacccgtattgaccctgacccgacccgttcaataaccaggtctacttcaaatatgtaggaagatacaaaagaaagtgggtaataaagaagaaagagtaagtgtatataatgatataattataagcaaggcatgtttggcatctatctagaatctggttttgggttttaagatttttcaagtcatatgatgtgaaatgtatgatggacttaaattaagccatattcaaagtaatcatgtctatatcgaaatctgacaacagaactcgaaaatattttttctggtttggacatttctatttaattggaaacacaaatgataacaaagagacactctattgatagaccctttaatttgatggaagttacacaaatttacttgctaaaaattgcgcagggcacacaagaaaattgctgctatcgaggcatgggagaacagcaagaaagcatctcttgaggcagagctgaagaagatcgaggtatagtgccattaaacagctatctttatctcaagttattttcgaacaatagaagtttgttgagctgatgaggccagcttacatgagtgcaggaaagcttggaaaaaaagaaggcagaatatgcagaaaaaatgaagaacaaagtggctatgactcacaaggaagcagaggagaagaaggctacggttgaagccaaacgtgctgaagatgttctgaaagcggaagagatggctgctaagtatcgcgccactggaaagccccccaagaaacttcttggtttgttctaataaggattatgtgaatttagtaattacttctataaatgtttgatgtgattaacaattaagcaagtcaattagtttgtgataaggaaattatagataagttatttgtattttttttccatttgtataattgttttatggctttattggtttggtaggtgtgtatagtgtgggtagaacgatttaagaattggtgcacattattttccatgtggatattgtttctgttatgtaagtaaattggatattgtttctgtaagtaaattggatattggaccataacttgtgtctgatgtctatcatttcctattgtcttgtcagtcgtttgcaaattcgcaaatgcaaaggtttaacggaaacctgttctcctctgaatagatagttggaatcgtgtgatgcccactccaagtgcatatactaaagtccccctcggagaacagttgtccaaatatcctaaactagctgaaaattatcttagatatgaattaaactttagagcctccagagtcatcacgttatgttatatatgtacgtagaagaattcatccgctcctgttagtgttcagctaataaattagtaaactgttagttctgcataatgtaccagtactacaagaaggattatacttaagactgttatcttactaatgaggtctaatatgtgacaaagattgtcaagattatgtaaatcatgcctgttagtataaaacaaactgcactgattaattttattcgctggttggagaatcgagcaacatgttcattgctgtatctgaagtgtcatctgatgcaacagaccctgagtctgtcctctgctgctgctctgttttgacacctacgtgttgcggaacttggcctgttacccctgaacaagcctctgaggaaggtgaaacacgatcgattttcaagggcagctggttttggatcttcctaaaggactctccgacctctgaattccacatagaaaagaagtgatcagagttggttctggaatatcctgaggggttgtagagggattctaatgacaaccgagcctcggtctccaatcggatactttcccattggaccatatgacgggttgtatgtgactttgattgtgtagtttctgagtcatcgttgatggtttttcgtttcttcaagtggctgttccagtggttcttgacatcattgtctgttcttcctggtagccttgctgctatagcagcccacctgtaaaaatagcatgcataatacttaggacagctaacctctgttttatcaaccacggaatttctagatttgaggtatcttgctaccttgcatacaagaaatgataaacatctatacaatggatgcatctagcaaagtgtctgtgatatagtgtttgtgttgtttttctctccttttgctacttcacaaatgcataaaagataattgacgggagagttataccttttatggtctaaacgattttttatctttaaaattaatttgacgacgggaaaagtatcatttaagtctttaagataataaagtactagttgtcttctctccttttattaagtactgggtattattatatatgcacaatataatgagattcagcgtaaaagttgtcaccttttctaattggggatgactataattttttaaaaatatttcatagtttaggtaagagattatgaaatgataaaaagtttcctaactatttctaaagagtatatttttcatgtgatatatggtatttgtaatcacattagggataataaaacaattagaaaaatacctattgccaaggagtccatgaagttgaataacagtctcgttttcctcttcagagaaaggacctcgtctaatgtcaggtcttaaataattggtccatcgaagacgacaactttttccacatcgagatatacctaacatataacatcaatatgaaattttatcacacaaattaacacatatatagaagtaatattttcaatttttcatgaatgaaatattcaagcttaatgagttaattcaccttattggatgtatagtcatatacataatcaagacaacctttctaggtagcaagtaaattgtatgactttgaggtgggatggccggatgggttaggtccatgggcttttgaataagcaagaagtgagtacttcgggaacgtacttatttttctgtaaacccttttaaacaaaaagcaccagtggtctagtggtagaatagtaccctgccacggtacagacccgggttcgattcccggctggtgcataaaatatcagagcaatgatgataacattgcgcctctatgtggcagattgggtccgccaccaaacgtctgattcctcggacgaagctagagcgcatctgagctttgaatttttttgttcttttttttaaatgatttgagggacaatttttttgagtgatgataataataataattgaagtggtacaaactaacaaaccgataataaaagaaacatacgatcagcttttttttatcgaatgtttttgtcaccttttgcacagaagaaagttataagagatgcaagttctcatgggttattgggttacgtaggagaaaaataatcttcatattgggccattggcctaacaagtaaagaaagtaacatttgattcataaattaagagatatcatttattttaatttattttattttattttattttattttatactccgtttacttctaagttataagtcactatttaatttatatcatcttaaattagcaaagtactttaaaattttaagcgttgtttgattcaacttattttaatatatctgaatttatttaattacattttattacactatacaaaatgatacctttaaacaagaatactaaaagattatataattactagtatgatagagagatgcaaactgatatacttcatccatttcgttttaaatacaacaaaagaatatcttttgtgagatataaaatattctttttttacattttaaaactcgatgaaatatgtatgaattggaaaaattcaaaaattggaaatatatactccctcctatgaaaattgtaacagttgacatacactatgtatatacttattttgaccatattcaaaaagtaatattgttattacgtgaaatgttcttaaatttatcctgaggcttgtaaaaattgtaagtaaatctcctacatgagaatattttgcatgaaaaatgatatcaatatataatgcatgaaaatttttgtgaagtatatcccttcaaaatgtcctattatcctgatatatcctcgcaaaaaactcttttattataaatttaaaaaaataatgatagtaaaaacactaacctgcaagttgagggagagacttccagttaccaggatgaccattgttgttgcggatgaaatgaagaagcttttggtcttcttctggagtccaaggccctctcttgaacatattttcatgatcatcctgtttctttcttttacaacattttgtggatgaactttttggcttccccataatttacaacaaacctcatgactttaccaaaaggtaaaaaatcacttcctctttataccaataaaaaagttgaatagtaaggtaaaagaataaaaacaagaaaaaacaatggatgaaaagacagttcaatgagatgaagaggatgatgaatgatctgaatgtcaaattctaagtgtagcagccagctctctgaacaaagagtacttgaattaaatgttgtatctagtagtactacataatgtcttttaaatattttattataatacacttgtttgcttatgacgagtcatgataatctcattttgaagatggacaacgaatatttaatttgagagttctttttaccaatattacccttgaattaactctaaaaattacttattcacttgttgagtagacattaagagagtgtttgatcggaagggaaaattttcaaaaagaaaaatgattattttcattttctcttgtttggtttataaggggtaaaagaaagttttaacatagtggaaaatagtttcaccaaggatggaattttacctccttttttcaattagggaagatgattagcttaagccttaagagccaatcctcttaggtaggactgttcgtgagttgagttggtgcaatttaggatgtaacccaaatcaaatcacatatataaagtttgacattttttcagaccaaacctcactgcacttttttccaaactggaccatgcaaaacggcctggtgcagtgcggtttgcgatttaatcatattttcctccgtgatatgagttttgtaatctaaaaattaaaaaattgtataaagatgttgataaaccaacacacaaatctttaaaactaaataataaatacaaaaattccaataaaataaaaagacttcacaattcacaagctcccgctaacagacgaagttagaagaggcaaaaaaagaggagcagataagtgaagggggagacatgggattgcaaagaggaacatatgagtgatgagtgcaaagagtcaaagacctaacatcctattctaatactcgtgtagtcatattaacttgtaatcttgtatatatagtcgtattatcttgtatactgatttgtgtgtgagtttgtcaagtgtattttctctaaaaaaaatctaaataaataaacattattttttgaaaaaaatcatataaatttgtggtttacgttgccatttcggtttacaaaaattcaaacccaaccaaaacaacaaacaaaatcacaaaccaaaccacaattttgaaaccgcggaccaacccagacagcgaaaacatggttttggttagggtaagtttattgcaagtcttgaaaggagccttgacttgagacttttgtggatcttgtgcaataaactactctaagacttcatagagtcttaaagtgagttttgatttctaaaactcaactcaagactccccttgccacatgtcttaattctattagaatttttttaaaaaatattagcccaaataaaaaaatctaattaataaaaaaaaagtgagtctttataatagtctggggataaagtataaaagtaaagagagtcttaaatgaatctgaattagtggaaagctgatgtggcagagtctgaagtatggttagagtcttgcaataaacttacctttacggtttgatacggtccagaccgcactctgaacaaccctactactaggctactaatatgttaggcgcactaatttcgaggcattacaaggttttacaacaagaatacaaccttaatatttgaggtggtactctattgaacaaccaccttttccttatgaattttatcggaagaaattcaatacctcaatctcattacttatcttcctctttctattttttttgttttgttttgttttggtgaagtctttctattcttttctctcattaccacttttcttgtttttatctcacatttcttacttttatcacaattttcttgtaagaaaccaaatatgattgaaaataattgcagtcatgtttttttccttagaaattattcagaagagtatttttaattgaaaatgtcatttgtccaactagaaagagcctaataattatgaaatctcacttaattatattaaaatcaatcttgtaaaatctataataatagattggccctctcataaagtcggtaaaataaagcaataacataaataagtgtaattggtcttgtaacagaccgtctacttttgatttaaaagtaggcgcgacctaagtccaatattaagaagagaatgtacgatctttcttgatatagtgactactttagtctatttagtgacaattttaattcagtaataacattctttaactcatttagtgactggtttaatccatttattgactagtttaatctatttcgtaagactgtcagactattttaaaaaaattatttgttgtaattcgagattcaaagggaaacaaaagaagcataagagaatggatgattaagatgatgtaaaatacttagaaatagtgttaggttaaagagaaatgaaatgggcttgttaaaagaatatatgcttgagttgtctaattttatattaaaattaaaccgtttattataataatttgtttcaagtgtcaaatatcatgaaccaaacttgtatttttgttggagtagtagggtggtatttgatttaatatgatgcatagttttgtcagaggagaaaactagttgatacaattcaatatgtatattagactacaataatttttgtatgacgttgaattaattaattaattttaatttaataataaacgagtaaatccatagaattttgcgatagatttaacaaaattcactacaggtcacagtagtcaataagcctctgacacactctttgacaaacacaaagacataaatgatagtattaaccattagtagacctagctagtatatatggactatggtctatatttatgagattttcctcagagaaaaattagggtaaagtacaagtccataaataaacaaataaatgcgactaaccttaaatgcaattgaagccaccctgcaggattacatatctttaagttccctagctcgattgtcctttgtactgttctccatatatatatgtaggataattatttcatatgacatgtagaataggtttactatgtttcttctgatcagaaattaataacaagtgtgaccataaaactaggaaattgataaattgccttagaaatagtcaattaggcaaaagattttgatttaaggcgtatcttttgaattatttttttttaaagagaaaaggtcaaacgacatctacaatagatgataaagaaaaagaagatacaattaaacaatgttaaatcaaatttgtcttcgaaaaaactaaaatgaaccagatcgatcgagcaatacagcgcaacctcttgtatttgctgaatcaaacagctattgatgataaagtctatcattctgatatagtttgggaaaagcattcttgatcgagccatgttaaacgcatatgagattccaataccttaatattgagtgaacttcaactaatgaaaacgatttctcatatctaaaattttaaaaaactctactcacaactcccatagaggagaaggagatctccacaacaaagactaaaacccccataacaagatttgaagaaatctcataaagagatactaatttattcaacaaaacaagaaaatgaactaaaaaaaaataataaaaggggaaaatggcttaccatggatgaaatcatccatggcagctcctaaactgttgaagaagggatagaggagctagggcgcgattttagagagaaaagtgagagtaggggacggctaggttattaataagtaagacctagacaaattaatgattacttagcatacgcggtttcaagtattatatatatatatatatatgaaatgattttattctaagtcaatcaaaatcttttcaaaatcgtattgatctccatcaataaactaacttctagtaactagagtccagactgataaatatcataattcataaagattttattttaaagagaacctccaaagttacataaggagagaaataatacctaatatttagatagggaaaccctcaagagaaagagtgacatttgaaaagctctattgagcacattagcttaaacttatatatatatatataaaaggagaaacttgatgcttatcttcgcccagagacatatggcagtgcttatacaaaaagaacaactatggttttcgagagagaagaaagaaaggagtttgcttgttgtggaattattttttttttataaaagaaaaattgaaagctagctccataaatatggatttaagataacaactagttttttttgtccgggctatgcctcgagttagttacaataaacaaacatgtcaatatttttaaatttcataatgtattttgctactttttatattttttgtgcattaaaaaattcacgtcacaacgtgatagtaaaaaaaaattgaagggcttgtgtttgaaaacaatatataccttataagaaattgtggcaaaagaatatgacattaatattctcttgtaagttaagtctttttagttaattataattattacaagacttcatcacattttatttgaaacattaaacaacaaagtcatggtgtattgatggttaagctcttatttttcatttcaaaggtcatgtgttcgataccttgcacttacacattttttaaaaagtgtgagttacacatagacataaaccatttgcattagaggtttgagaagagtgccacgtgacacatcgactttctttcgcacgctttttaatatatttgtatagattttaccaggcttatcactctaattagtaattatgagagcatccgaaataattttcacaaggttcccataaaatagtttaaagtcccttgacatggtagattatcttttatattttccttcattcattaaaaaagttcaccattaactttttgggtaactttttagtttgttcattcacctaaatatgagctcaaagaatgtgcaaaacatatatgaacaaaatcacattcctctttagtggatcatttggacaattctatgaaattaaacacaagaaataccaaaaataaagcaaacctcatgcacgcaaaggaagagacaagcatatcctaattcctaatatatagtttttggcataacatggttgcatatttttttcataaattgtccttaaaaagggaattactttatctccaagtcatctaatctttagaaatagccctctttattcccttgtaagccctaatataatcacaaatcacgtacaattaacaacttctctaccttaaaatcaaagcaataatctttaatcacaccgtgatcacaaattaaaaaatggttaagctaacgataatcggaaggattagagatggcatgccattgacacaaggtctaaggtatgttaatgaagattacaacaacattccattttacaagcaacatgctgaattcatcctcaaagaaatctcaagaggttctttagctcttaatccaaagatgactatacgccttgatcatcaacattctttcaagtatatatacatcctccttacaattagatttctttgtaacaaccttagttaatttcactttagttaatttacgcgatataattagtatggctaatcatactttgttcttcttatgtgatcattgtaagttgtttggtcgatagtggtgtttgcttcatcacattatgtgattcttcatatccgagaacactagcttttcattaccttgaggatttgaggcatgagttggagaaatttcaaggtgatcaacttgttgagaatattacaagaccgtatagttttgtaaaatttggtaagaagctctcacctgtttcatttatttatttgcgttatggtaagtatattatattagagtcctagactagtaatatatttacctaatcataaggaaactagaccagtttccgtactaatttaggactctaatataatatacttatgataactctagtattattcgtttgttagccaaaacttgtacgagacggtctcaacttatttcacaatgagacatgtgtgtattttttagctaataataaaaattaagattctttattgctaaaataaataatagtttgttacgagtattttgcataattaactataatattatcttgtaaaccgacataaattgtttaaaaggtaactttaaagttttttgggtaacttttaaggaaatttcatagacaattttggtatcatctatggttaaccttgtggtctaattgcgagacaatctcacccaatactagatattatttcgcggattgatcataataagattctatgtgataaaaaaaaacttatgtatatattatggtttttcttgtccaatatgtttttcatttgtttaacgtaaattgatgtctgcagacagtgtaataagcagcattagaaagcaatatgtggacacaagaacacaagctaatataaagaagttacatgcaaattctgggcaagaattaaatatcatagtagaaagcttgtctacggttgtaaaaaacagaaagcaattaggtaaaatttctgtctcttatatatattactattcaactgaaaaataaataaaattgggcaaacttttatcaattttgcgaaaattaaacatagtttcattgcattgctagattatagggagaaagttgtcatggctcctcaagctgtttcacctatgtggagttctcgacgtcttaaggtaggccatgtattaaatagtcaaacatttgttaagcatgtctataattttttgtgtacattacaaatcaagtgtaccaagaactattttctcttttatatggagcatcttttgtttgccgctccattagaagtttagaactacccaaatgagtaagtctgctaaaaattatacttgctcctccggtttttttttatctttctcttttttctgtgcacatttttcaatacacatttttgaacttaaatatattttattatatattagtaaaaattataacgattgaatattaataatgtactaattgagacgaatcaaacaccaccccatatgactataattttcttataaattgaaaaaaattgagaagattttctctaattatgaatgtgttaagatgctaaatgaaaacgataataataataaaaaacagagagagtacacctcaatatttgaacatttcttcaatgtaacataatcaccattttcaactcttgtatatgaaagacaagaaaacattgataagttacaaagacaaacatggaaaagattgttgaaaacttggttttataacatgacaatttctagagaattaccatttgcaattcccttccctattgaataagacaagtttatcattttctcctctaaatttgtatggaaaaattgaaaatttcattgaatggactttcatttcatgttatggcagatcattgcattgaaatggacgccaattggaattgcaatcactgtcgtggtcactcttctattgtgggcttccttggtcatggcaaattacgtggctttgtgctcgtgacataatgtcgtagaaggcccaatacacttttgtcattttttgaaactttgatttctacaaaatactttatatgggttgtttggttcattatttttgagttttaagaaacataatcaattatcgattccctttcgtcttgcttggttcaaccccacatcaatcccttaccattacttgatggtaatgactacccttcatttccattacttgacttggaccaaacactcaataaaggcaactattttcgttacctttctcctcctctatttgtatccattccctttccatttcatatgttgaaccaaacgaccctttagtctgctctacatttattcccagttacacaagtggtttcaaggaaactatagcataatgtaaacagttcttcagatagtgaaaatgtaagacttttgggacttacaagatctctacaaaatagccaaaaacttgcatagaattcttaagactgcaaaaataaaatgagtgtaatacttgatcatggtcatactgttggataccgtaaactactaagttatatggattcttgagtgaagcattcaagggagatcgaagcgacacttaaatgtgaaagaagaatccatactacttgttttgtgtgaagagatgctaacttatctttcatgtctttgattcagctcttagatatgaaacatattagcaagtacattgctatgaaccattcaatggagatcgaagtgccacttaaatgtgaaacaagaattctctgtactgttgttgtgcaccttcaccatagacgctaaattctctttcatgtcttcatttccgctcgtagcttcaaaatcttctatgttatgccaccaaaatttattgcaaaactgctcacaacaacatccatctcggcctttgctagctaactttttacacaagtactgcaaaatcaaaggaattctttgtagttttgcaagtatacccaattaataagtagacttttatgctaaaaaacaataaaataacaagatccgtctcaaaatcacccctaataagttccaatcaggtccaataagttgaattaggtccaataaaatatgtttagttcagttcaagtcaaataagttcagttcagggttgtttaggtgaagagaacgcaccctaagtctccaatgaaccctcaaatactatggagaggaggcactaatagtagccagctcagctcatagctcaaccacctaagctcagcacctagctcagctcaacaagttatttcagttcagttagttagttctcctaactaactatattcaactacgtattctctctccttagattgtaattcaatgatgttagttcacaatattctctcattttgtaattattgagagtttcttatctctccaagattcttctttcttatcagtaaaacttcttctatattgttgttgattataattgatcacatttgatcaactaacaattaccctttattgctctcaatacccctttgatctgtctgaagatgctaaaatcctaacccaccttcctgtcttaactgcagtcacgattcccactctgtaatagcccatctctctcctctgcttgagaacctcgcctcagcagtcagcagtcagcagccagcagccagcttagctttcggactgtaatacagtggggggtgaagggtggcggtaattctgagactcgaaatatgttgacagtttacagttggggtatgacagtgtttggccccaataactaattaaaatcttaaaaaatcttatgtataaaacctcaaacaacagctaatctatatataaggataagatcagtacctcaacaataccattacaatagccaagtatagtcaaggtagatggataggtgctccaaactagcccatctacaaaagctgctgaagttcgttttctgagatgatattgcctcgccactttaaggtgaacattgttctgttgggaaggccgaattgttgctccaaattcattgagttcgaattccaccttcaaaattaatcaaaaacacagacaagtaaattatttaacagcacatctgaatcaaaagttgagacatcaaagattgcactcctgtacctgtatcctggactgtatccatgggtcaaatcttgagtcaaatccaatgctcaaatagattttttgtcccgctatatgttccataaataccttaaagcagatgaaccatgatgtatctaaatcacaagaaagacgaaaatgcaacttaacaaggcatttatcagttggtaagttaagtttaagtaatgatggtacttggtccccctcatagagcaactcccttagatttgggcaatcgatgaaaaccttcttacaaccacaaccacggtatttgaaatacctcaaattcggacaatcaacataaatctcgtgaggatcaaattctatttctaacttccttagatgataattagctgctttaaaccaatctgcatcaatatcttctgtcacaagctttgctttctcaagaagtggaaaatcagctgtaaggtctccatatacgatataattgtctactaagtggagatccctgataggattatctgagctgaacaataattccaaatgagcagtacaagaaaaactctcaaggtttacacattctctgatgtcaacttcacaaatccggccattctgtgaaccctcaacataggcgttctttagcttatgaaatatagaaagcgtgagagttttcatcccaaaagtgcaacatttaaactctaaaagttcaatcaatgggcaactacttgccaagttgcttatggtctcctcatccgacaccataacatgtgagagccacaagtgtttcaaagaagaatacatcccgaccacatagtttccaacagtggatgataatcgacaagctcgtacagtaagagactgcaaccattttgaagaaacaagtatttccaggtatggaaaattataacatgtgtccgcacatatatcataccaacaaaagtcttttgtttgaacaaaaatgcacaactcctcaaccctagtttgtctaactagattcatcaatcgatcaacatgagaaaagtcagcattattaacaaccagattcaatgttaattctaaaactggcgtatgttgttgatttatagtcaacaagcgattattcacagaattcatgaatctgtcctttatttcctggtcttgtccacgttgagcagaaagtgtagcaaataaagtctcatcaaaatacaaagattgcacaattttgtatgaagagcatacatatttccaggtcttggacagaacagatgttcgaatagcatcttttatgagaagaaatgatagtatacggtggattatttcctccggcaatttcgaaatcaggtccttgtgattgatgtaatacatctttttctttatcagattcttgttcatactatcttattcttcgacaaaacagatgttggagtaacagtatgctgcacatgtaaattacaccattaaagttatccagaaactgatcattgttatcagttttatttatgaatgaggagatgaaagattagacacttctttccacaaaatgaaaaaaatcagttgagcaagaaatatattaaaatcagagctatacaacaaacattagaagattaaaaatatgaatggtaagagaattaaagaaattcacctaaattgacttcgttgaattcttgtaatcttgttaccagggatttgggaagaatgtgattttcaagatacaggagaaataaaaaggattttggtaaaagtatttgtatttgaagatggcaatgggaaacggaaagagaatcctaatttattgaatagcgccttgattgtactacagttcaccacttttaaccatccggctgttcaagaaattggatcaagttgatctgatccgaaaaatctgatatcggatccgacatatattcgaaaagtctgattcttgacaaattagaaatatacacttttggcgtgttcggcacaagcttttcaagtagccttagatggtaaacttaattgtactaacgtttgcggattctcgtgatggccactagtccgggctggcagaccgaatcataggccgtagcgggctgggctgagattccatggtccaggaccggactatgaaattcatgtgttggtcgggctagtccgtgggctgaaaaatcttgactcacaccgatctgttactggttttcacggttcgggaagcgattttggcagttcatggatctagtgggctggatcggggtagcgggccgacgtgagaatttttaaaaaaattatttaatcattgaaattattcgttatttttacataaaatctttaaaatgaattaaaatatatacaattattaatattaatgaataatttcattaattttaaatttgattgaattataatatatgcaatttgattaaaatatatacaatttgattaaaatatacacaatttggttcaatatttaattggactggactgggctggtctgattcatgggccgggctaggcgcaaaaaaaatctggccacgacccatccaccaattttacagtttgagctacgttagaccgtgatttatgcgagcccgacccatacgacccacgaggtgggttgggctggattggcccgcactgttggccatctctagcggattccattcaactttttgattccgaggcactatataaggtggtcatgaactcgtaatgtcatctaaaactcgtgaacagtcatcagtgtgttgcttttatttgtcaagcacttttttttgcgttcattgtgcttgatactcaaaaagtatacgaactctttttagtacctacactcaatagcaccaaagacaacaaaagaaacttcattggaatttcttaaatctggtatcatgttatctgattgtaattattccgatctaagatttggggccggatcagatatccgatttgaatcgccctagactcactaaatgacctatcacaacccagttgatctcacacacactccatactaggagccgatctgatcatggacaccgtaccagtagcagtaaattaagtacatcaatcttgacctccaatagacaatacctaacaaatcttgatgcttaaagattaaaaacatagtaatctatttagacttaaataattcatgcaattgccctcatgttttttttttttgataaggagaaaacaacttagcactaaccctataatatgatcagcttagagcatcctctccggtgatggaaaaaaacacaatgttggaagaataaaaccaatacaaaaagtgaatgagcctcgtgaccatgatgcgccatgtgaagagcttcaaaaccctttagctaaaattagatacatttcataacaattacttgcatgatgataaaaatcatccattaaatcttagatttcttgcgaattattcagtctctctgaatttcctattgaaaaatttataaactacagttacaaaataagtaaatgaacttacttacataaatgagcacctttttttatattaaggctacatttggtacgggtaaaatattttcctgaaaaattatcttcctttattttcaattatacattgtttggtttacaaaggagtatacaaccattttccctagaagaaaaattactctttcactaatagaaaaaccattttcctttcaaaatgaagggaaaactggttttccttcatttttcttatctcttctttacacacctcttcctacctctttactttctttttcatttttctttcttttcatcatttttcttccatgaaaccaaataacggaaaactaattttagaattgtgttttccattgtaaaatgtttttcatgaaaatcattttacaatgaaaatattttacacccaacccttatctagtcttttaagaatttgataatgcttccttttatttgtccaggtaaatttaatttgggcccactaaaccctaggtctattatattacaattattcatagtattcgtaaaaaggtctgccctacttattaccaaaatttctcgctttgattgacgacttcatcaaatcacccccaacaagccaaggttttttcaaattatgagcaaatctttcaaggtcgttccatagaagcttcctatttctaaacttagtacttgcaataaggacaaaagaagatctagtagatattacctcaactacgccgtagactccctatgcaacttctccaatgacttgaaaatccaagatgtgtgatttccaaaaaagaagaatatcgcctgcagaatccattggttcgagcaaatgccaagtgtcatagctaagatctctaatgatcccagttgtcttttccctgcccacaagtttcggctaagacaagcaacgacgggtagtttcgtaaggtcatatataactcgtgaactgtcatgagtctgatgattctatttgccaagcactttttttgctgttcattgtgcttgacaaactcaaatagtatattaactcattttagtacctacacttaagagcaccaaattaaagacaacaaaagaaacttcattggagtttttcagatctgtgttatctgattggaattattctgatccaagattttgggtcggatcagatatccgatttgaaccgctccagactcactaaatgacctatcacaacacagctgatctcacacaaactccacactaggagctggtctaatcacagacatcatcccagtagcagtaaattaagtacaataatttcgacctccaataaacaatacccaacagatcttgctcatgattaaagattaaaaagatactaatctatttagacttaaataattcatgcaattgcgttatggttttttttttggtaaggagaaaacaacctagtactacccctataattggaccagcctagagcatcctttccggtgatggaataaaacacaatgttggaagaagaaaaccaatacaaaaagcgaatgagcctcgtgaccatgatgagccatgtgaaaaaagcttcaaaaaccctttagctaatattagagatattccataacaattacttggatgatgataaaatccattaaaatttagatttgttgttaattattcggtctctctaaatttctattgacaaatttataaactatcgattactattttagtaaatgaacttacttacataaatgaacatcatgaaatcattaaggctatgtttggtacggcgtaaaatattttcctgaaataattttcctctattttcaattttacattattttgtttgcaaaggagtgtaaaatcatttttcctagaagtaaaattactcttccaatgatgtaaaacaataaaaaattattttccttcaattttcttatctctcctttacacacctcaccttacctcctttctttttcatttttctttcttttcatcagttttcttccatgaaatcaaacaacgaaaaactaattttgcaattgtgtttttcattgtaaaatatttttcatgaaaagcattttacaatgaaaatgttttacacacccaacccctatctagtctttcaagaattggatgatgcttccttttatttgtccaggtaaatttgggaccattaaactctaggtctattagattacaattattcatggtattcgcaaaaaggtttgccctattctagacacaagttttccccccaaatttctcgctttgattgacgacttcatcaaagtcacccacaacaagccaaagtttattcaaattatgagtaaatctttcaaggtcgttccatagaagcttcctattttcaaacttagtacttgcataaattgaaggacaaagaagatttaatgggtatcgattgcacatccacttattctctaagtagacgatgtcttggcatgtatgccttaaccatgcccttgccggtgtattggagttcactttcataagaacacagacaactacaaacctccttcggtcaccatggattgaatgggcatcgatttttataatgctcctaagagtatttccaataattttcaaatcttcttcctaaaaaaatctagaggctccgggagattcacctgaaccgggtactgagtgatgctttcttgggaaggcttgaaaccctgttgccaagcttgtacccaaattagagagcccataacaaaccatggtcccacattcaaaatgtgagatctctcttccggtgatgggcattttgtacagtaaaaccaacgacccagcgatgtctctatggcacctttccatgaccatagtttctggagttcctatttcagaaaatcttggtagaatgagcaccccaccactttgcttataatagcatcaacccacggtttaacaagctcaacatattggctctctgatattggtatgaaaacttcctcctcaccacaaggatgagggtgagaggttgcaaaaggaagtgggggcgaaggggaatattcaccgctatcttgaggtgctactccacctcactcctaattgcctctttgaatgacctacttttagacgaggttgcagaacggggggagggggaataggtggacctaggagaggagggagggactgggacgggacttacatcggcatttgctcgaacacaagggttttgcagtaggaggcttcgacatctctcctcgtgttctgtcgtgtggccgggttttggtgggttttcggtgacttaggggagagagaattttctctctctaagattctctctataattaaagcccattgatttcgtctttttgaaatgactattcttttacaaaattaaactttagtttatcgaaaattccataatatcatttagttcacggagcttgggataagaacacaaaatgtacgggcatgggctagtacctaaactatcatatggaagatttgcatagcactattaggagcaaaggtggaggaaactttgggaaggcaggttctgctatccaggctatagaaactataaaattacttcacttgtattacacttattacacactctactaacctggtgactttttataggaaacaaattcagtttatattaatcttatatttagacattctcatattctaaatctcgctaaggagtctccaaaacataaaaataaggttatagaactatatatagtccttttgatgtggtactttctcgagcaactacatgacttcaatgaagaaagacaatgttatagtgtttggttgtcaaagttgctaggagggatgtgaatcgagctcctactactgtcaagtagtgtgtggaatctatgtccaatatcatttaattttgtaatttttggtttattgttttgttctttgattttataattttattaatagcctaattgaataacaagcaaattaaattagctgattcttcatgacaattattgtcaaggaacaattgactaaatattctctttcagacctcaaaaatacaaaagctctcttttaccacctagaattgttaattggttaaacatagtttcattgcattgctagattatagggagaaagtagtcatggctcctcaagctctttcacctatgtggagttctcgacgtcttaaggtaggccatctattaaataatcaaacatttattaagcatgtctataattttttgtgtacattgcaaatcaagtgtaccaagaactattttctcttttatatggagcatcttttgtttgccgctccattagaactacccaaatgagtaagtgtgctaaaaattatacttgctcctcctgttttttttttttatctttctctcttttctatgcacatttttcaatatacatttttgaacttaaatatattttattatatattagtaaaaattataacgattgaatattaataatgtactaattgagacgaatcaaacaccaccccatatgactataattttcttataaattgaaaaaaaattgagaagattctctctaattatgaatgtgtcaagatgctaaatgaaaacgataataataataaaaaaaacaaagagagtacacctcaatatttgaacatttcttcgatgtaacataatcaccattttcaactcttgtatatgaaagacaagattacattgataagttacaaagacaaacatggaaaagattgttgaaaacttggttttataacatgacaatttctagagaattaccatttgcaacccccttccctatcgaataagacaagtttatcattttctcctctaaatttgtatgaaaaattaaaaatgtcataaaatggacttttatttcatgttatggcagatcatgatatagttttatcaggactcggcaggaggaatgataaaactatatcagatataggcaactttgcctatatcaccaatataaaattgaaaaagtaatgttgtgaaaaggttgaagtacaaaaataatgtattaaattcagaaaacatatttttattcaactttttgaatgtgagaaagggaatagaaggggaatggaagggaatgggaaaaagtgacatcccctctctctctctctcctacaattgatccgaccaaacagaaagccattctccaaaactccaaaattcttacaataactttatttttattatggagagaaataaaaactaaattaagtgggaaattaaatgttgttgaattgtggaaaaaaggcctcgtcaatttagttgttttgaagatattgtggaaaatttggagaagaaaattggactttcatgaaggtcgagagctaggagaaaaatatagttttatcaggactcggcagatcatcgcgttgaaaattgaaatggacgccaattggaattgcaatcactgtcatggtcactcttctcatgtgggcttccttggtcatggaaaattacaatgctttgtgctcgtgacataatgtcgtagaaggcataatacacttttgtcatatttttgaaactttgatttctacaaaaaactctctagtctgctctacatttattcccagttacacaagtggtttcaaggaaactatagcaaattatatggataaatgtaaacagttatccacatagtgaaaatgtaagacttttgggacttgcaagatctctacaaaatagctaaaaatttacatagaattcttaagactgcaaaaataaaatgagtgtaatacttgatcatagtcatactattggagaccgtaaactaccaagctatatggattcttgtgtgaaacattcagagggtgtttggtatgataaattttgatgtaggaaacggattcaaataagtgtttccatttctaattgtttggtatgagtgttaagtaacaaataccgtttccaaggggaaacataatccccccatttattacccttatcaaactagtggaaacaaatcacgtttccttcctcaatcataatcctttcaattgtttccattccactaggataccaaacaacaattaaaggtaacagttattatttctatttccccccatttgaatctatagtacttgttttgtgtggagagatgctaacttatctttcatgtctttgattcagcttttagatatgaaacatatcagcaagtacactgctatgaaccattcaatggagatcgaagcgccacttaaatgtgaaacaagatttctctgtactattgttgtgcatcttcaccatagatgctaaattctctttcatgtctatatttccgctcttagcttcaaaatcttctatgttatgccaccaaaatttattgcaaaactgctcacaacaacatccatctcggcctttgctagctaactttttacacaagtactgcaaaatcaaaggaattcattgtagttttgcaagtaaacccaattaataagtagaattttatgctaaaaaacaataaaataacaagatccatctcaaaatcaccctaataagttccaatcaggtccaataaattctgtttagttcagttcaagaccaataagttcagctcagataagttcagttcagggttattcaggtgaagagaacgcaccctaagtttccaatgaacccacaattactatggagatgaggcactaatagtagccagctcaactctcagctcaaccacctaagattcttgtttatactcaataaaacttcttctatattgttgttgatgataattgatcacatttgatcaactaacaattaccctttattgctctcaatacccctttgatccgtctgaagatgctaaaatcctaacccaccttcctgtcataactccagtcccgattcccactctgtagactgtagtagcccatctctctcctctgcttgagaaccccgccaataactaattaaaatcttagaaaatcttatgtataaaacctgaaacaacagctaatctatagtataaggataagatcagtacctcaatcataccacgacaatagccaagtatagtcaaggtagttggataggtgctccaaactagcccattcacaaaagctgctgcagtttgttttgtgagatgattttgcctcgccactttaaggtgaacattgttctgttgggaaggccgaattgttgctccaaattcattgagtttgaattccaccttcacaattaatcaaaaacacagacaagtaaattatttaacagcaaatctgaatcaaaagttgagacatcaaatattgcactcctgtacctgtaccctggactgtatccatgagtaagttcttgagtcaaatccaaaggtcaaatagattttttgtcctgctatatgttccataaataccctaaagcggatgaaccaagatgtatctaactcacaagaaagacgaaaatgcaacttaacaaggcatttgtcagttggtaagttaagtttaagtattgatggtacttggtcccccttatagagcaactcccttagatttgggcaatcgataaaaaccttcttacaaccaaaaccacggtatttgaaatacctcaaattcggacaatcaacataaatctcgtgaggattaaattctatttctaacttcattagatgataattagctgctttaaaccaatctacaccaatattttttgtcacaatctttgctttctcaagaagtggaaaatcagctgtaagttcttcatatacgataggatggtctactaagtggagatccctgatattactaccaccatctgagttgaacaataattccaaatgagcagtacaagaaaaactctcaaggtttacacattctctgatgtcaacttcacaaatccggccacactgaaatccctcaacagaggctttctttagcttatgaaatatagaaagcgtgagagtttccatcccaaaagtgcaacctttaaactctaaaagttcaatcaatgggcaactacttgccaagttgcttatgctctcctcatccgacaccataacatgtgagagccacaagtgtttcaaagaagaatacatcccgaccacatagtttccaacagtggatgataattgacaatctcgtacagtaagagactgcaaccattttgaagaaacaagtatttccaggtaaggaaaattataaaatgtgtccgcacatatttcataccaaaaagagtcttttgattgaacaaaaatgcacaactcctcaatcttagtttgtgtaactagattcatcaatcgatcaacaggagaaaactcggcattaagaacaaccagattcaatgttaattttaaaactggcgaatgttgttgctgtatagtcaacaagcgattattcacaaaattcatgaatctgtcccttatttcctggattttaggctcttgtccactttgagcagaaattagtagttctaaagcaaataaattctcatcaaaatgcaaagattgcaaaattttgtatgaagagcatacagttttccaggtcttggacagaacggatgtttgagtagcatcttttatgagaagaaatgatagtatatggtggatcatttcctccggcaatttcgaaatccggtccttgtgattgcatttatacatcttttcttttctttatgagattcttattcttcgacaaaacagatgttggacttggaataacagtatgctgcagctgcacatataaattacaccactaaagctatcagaaactgatcatcattatgatttatttatgaatgaggagatgaaaaatgctccttcagacaatttcacaaaaagacattaatctatttatagattttggttaaatgtacaaaccatctcatttcagatgccctattttcaaataaacttccaacaaaaataaaactatgcaattgcccacacttgaaagggctttgagacccatatctctattattattattatcattattatactccataagggaaggggagagctatggtgtccctatttgaagagactgatttacactccttttcttcctaaattacaaaaccaatttctactaaaacgagacttcaaaaaaaatataccggaaatacaattataacaaataatgacaagttaactgaaatcaatagaattgcataattcacgttacaaaaatttaattacaaaatataacccattagtaattacatactccctgtgtttctgtgctcgtcttccaatgcacgtttttaaacttaaatatctttcattatatattagtaacaattataacgattgaatactaataaagtattaattgagacaaatcaaataagaccccacatgactatgtttttcttataaattgataacatttgagaaaattctttctaagcatgaatagtatcaagattccaagtgataaaggtaaaaaaaaaacagagggagtactccgttcccaaaaaccatttacaattacatactcaaaaaaattacaaatgcactacaatgtcaatacaaattacaaactaagaaaaacatacgatttcgaatgagagttcacatttgtccattgacgatttgcaaacttctaaaaaagatacataattctttttaatcttgcaagtataatcaacttgttcaaagaaatgagctagactagattgacactatttcaaaaattacatactccctctattttttttatctttttattcgaaatcttgacactattcatagttagagataatcttctcaatttatataaaaaaaatagtattttattaatattcaatcattataatttttactatatacggaaagatatttaagtttaaaaaaatgcattgggagatacatataggaaagtgagaatgatgaaaaacgaagagagtatttccttaggaaaaaaaaaatcagtgacttttacacttcaacttgggatgaaaaaaggattaaactttccgaaatttttctctaacttgagaactgtagaaaacatacaccattgttaaatctttcatcatgcatgatgatatggtcaacaatcttataggctcgttcaaaaatctaatccagtctatcctatccgaaaaatcgaaaattcaatacaatttatcaagttacaatttttttttggaaaatgatatatgtaacccttagggctatgtataaggtgcttaaaatggaaataaaatattgaatcaagcatttattacctcaattgatgtgaaaatgtatcttgaattcttaaactgtttccatttgaagaaatgtatttaatgcttatatgtagcccttagggctacatataacattacccttttttttatcgaaattaccccaaattataaataaaatactgtaaaaatactctcaaacacatagttcctacttcccaccacctccgtcaagcaagcttggttacgtcttctctttctcaacatgtatatcattaaaaataaacttttatcatattaatatacttatatatcattaaatagtttattttaaggaggcaccatgcattatttttcgcattccttaaagtcgacaaactcgaacggggtgaactcatggagtttcggatcggatgttaacccgatatccgaaaatatttctattcaataatttggattggatcaaatcaaagctatacaacaaacattagaagactaaaaatatgaattgtaagacaattaaagaaactcacctaattgacttccttgaattcttgtaatcttgttaccagggagttgggaagagtgtgattttcaagaatggccgtaatatacagaatcactaagtagattatatctgtatatatatgactaggttttgacccgtgcaaaatgcacggattttttttatttataaattgtatgacttgatgatgtttctcccaaaaattaagggggtgaatattagatcgtgatttaaactttttataatcatatcgtttatgaggaatattttaaaattgacttaccatccgtgcgttcaataactaatgtaattaatattatcgtgcggcgttgactgaaaaagtctttgctctacccattacttcatattgagaaccaaataaaatcacaattcgctacattattaggattcaatcatgcaaccacttcttttctcactttctgccgtccctactttccacagtccctctcatccccattcttttgttgtcttgagaccccgtgatctttatcacaaataaaatttcaaaccctaatgctggtaactcttgatatggctaactgaacccgtgcaattacaaaccaaaaatggagatttaaaacatagctagaattgttatatttaattgaacctttctcctgaatttgggcaatatcatatttaaataaaatggagatttattcgaataattgctacattcgatcaattgaatcttatgttattaaagaaaaaatttcacgttcagttccagatttattcgaaaaaagttatccaaaaagtttgaccacagattcatcgaacacatttgatattttcaaaaatggataaaaaatgaatttgattgtgtttttatccattaaagtttgatgtgtgagattcagatgttatctatataagttttttatatgaagatgatgattcactttcttagatgttcaaattgagatgacaaaatttttatgacagtgaaaactgagagttctaagtaagggtttgttacagtttaggactttattaacaaacttagattttgttaagattatattcggcttctagatagaagtaagattctatgcacctctcttagaatttaaagcttgtaagtttcagactatttgacccatttgtttatttattttggaaagtaaaatatagaataaattgtattgtcaattatttgttacatgcacagttcacccttttttcgtttttattgtgagtttgtgattagctcactgacacaggttaataatacttgttccaaatgaacggtaatatatacaaataaaaatcaatttatatgtggaaatatattatatgacattttatcttttctttgagatgaatacctagaaattatgagctctcaaatttcatatgtatggtaatattatttttttttagttgtgattcagttgttgtgaataaactgaacaaatatacttctatatgacttacaaacttcacaaagatacaactacactaaaattatggacaataaatttcacataagttctatatgtaattttaatctttaaccttacttagagatgccatacatttaccagttaagatagcatattcctagcggaatttaaatactgcgatgtgatattttttataatgaaaggggtcccattgttattatactaaactttaagacatcttatgcttgttgttacaattaggctaccctcttttaagttttacaaacctcatgagccaagtaaaagttaacttttgttgagactttgttatcttttcttatctatttatatattggctaatccgttttttagttgatagtttaatattaggtgttagtacataaggtgtttagacttttgtgcaagtattagtacataagatgtttattcttttgtgcaagccaagtgctagtacataagatgttcattcttttatgcaagctaagtgttaatacataagatgtttatttttttgtgtgttatacatgaggtgctatcatcaattattattgattttatcgtgaatcgcgttttgtattgctaatcacattgtaactcactaataattatcatcgttttatgggatacactatagtctttgtaatatgacagcccacgattttatagtttgcaatgaacttataattttgatggtatggatatgtggtcaatgatcttataatttgaacttttttaaaaaaacctataatacaacttattgtataattaatacgtcccttggcaaactttaagtttaatattataatctgttaagacttttgttttaatttgggcttaagaagagagtacaacatgttcatttgaaatagttgtaataccttaagtagtacctaaactatcagcttcttgctataaatttatttcttaattagtgccaaaatatatgattagtaactcaaatatcgaatttaggagatatgaatttttaattagtttctaaaataccgtattaaggggatataatttttttaattagtgcctaaaatatcggatttaggagatatatttttttggcagttttatgatgcataagtaattactaattaatagcaatctattcctaaaatttagttgatttacattccataactgagaactttcttaaatagctttccaattatatgcctaaaaaaaataatgcataacagaaatatttaaagacaaatacacgtgccaaaaaattgtaaaagatattacaaaggattgacacatcagcaattcaatttactcttgacacataagcaaatccgtattgccttatagtattatatagatagaagtttgtctacgttaactcttatctccaatagtatcaacaggaaaaattataaaggataacttttcgggagcatatgtgccgtataggatcgccatgtcattaattttatttttctttttttcttttacaaaaatagagttctttgtacgtagatttaaatacatataaggagctttatataagcgaaagttagaggttcgtgttaaatgaacagcttaaattattatattatgtaattagtgtatatcttttgctacgtaattcagaatattataatttttgtatcattggatagtgctcgaaatatgcatcgaaataagatctatatataggagtgaaagttattcggatataatccaaaatccaatccaatccgaattagtaattcggatcgaattcgaactgtgttcggattagattcggaatgagatttttttttgaaaaatcggattgaggataattggatccaaaaatccaatataaccatatagtaatattccttgtattatgtatctggattaggcttaagtgcttaactgatttattttttataaaaaaacctactctatagcccaatacacatagcacttcaactcttcccctaaaacactaactccacttgattcctcgtttcctaaatctactatgttgttgttgtgcttaatttatttcatcgaaaaacaagagttctaaaaaaattggattttcggatcggatccaatctagagtatgaaaattcggattggattggatcggattcaaatcctaattggtttggattcggattgaaaaattgaaatccaaattttatttggatcggattggattagaccctaatccaaaccgcacaccgaactttcacccctatctatatacaatatagttctacaacttatgaatagagcgcgccacgtaggattgccatgttggatttaaatacactagaattttttgcacgcgatgcgtgcttgaattttttttcgaaacagaaaatcgattttaatttcttcggcataagagtcaaaatttgaacattagacatacgaaatacaattgtttttagttacaaaatttgattggtttagtttctgccacttaagtctctcaccattctttttgttttgttttttttttttttttacttttcaaagttaaattctatgaataaaatagaaattttattgaatttatttatgatttctaatattataattttgtagttgatttttgaattaagtacgattacttcataaagtgtaaagaaagtagacactttgatttcaagtcaattttttcataggttgtagtttgtaagtgaatttttaagtttttgcaaagtttcctcattttagtgatttgcataacgtaaattatgcaattttatgattttagttgtcttgtaagtgattgttataattatatttttgatattttttatttgaagccccctttgatttataagtgaatttgtaatttagaatcggaaggaggtaacatagtctcttcattcggggacaccatatctccccctttcccttatataattgagatatgttgtactttaattcttgaatgatattttacataaatttttttaccttgataattaatcgctattatataatagaaaaaaataggtccaaatatatgtaaaagtttcattatatataggaaacactatataaaaagtaaataatttttttcttgtctaacttcaaaattatgatttcattacaaatacacctctacttatcatgacccaccattaattgtgaagggttcttgagaatagtgatttgtaagtaaatttttgtaaatgtttttgtatgtattgacgttctaggttattagctagttctagtttgtatgttattttacgttttaataaagtttcctgattatttgagtgatttgtgtgatttttataacgtgattttctcaattgtatgggtgaattgtaaagtttcttcttttaagtgatttgtgagtgggtgttgtaaatttatttttggtagttttatttgaatgtcagttttgattttaacattccttttgtaatttagaaagggaattaaggggggcaaaataggcgtttcaaaagaggacaccattgctccccccttcccttatataatagagatataaggagcttgggataagcgaaatagagtttcttgttgaatgaaccactgaaattaattattatattctataatttgtgtataacttttgcttcgtaattcggaatattataatttttgtacatttggatagtgcttgcaatttgcttcaaaacaacatctatattatagttctacaacttatgaatagagcgcgccatgtaggattgtcatgtcattaatttttttttatttattttttattttttacaaaaatggacttttacatagatttaaatacatataaggagctttagataagcgaaatagagtttcttgttgaatgaaccattgaaattattatattatataatttgtgtataacttttgctacgtaatttggaatattataatttttgtaccattggatagtgctcgaaatttgattcgaagtaaggtctatatacaatatatagttctacaacttatgaatagagagtaccacataggattgtcatgtcattaattttcattttaaatataataaaaaaaaatagagttctacacatattaaaatatataaaaggagttttgaatagggagaaatttacgtttagttttgaataaacaacctaaattattatattatgtaaattgaatataacttttgctacctaattcaaaacaatatcattttttacaattcgagaatgtttgaaatatgtttttaaatgagaacatgtgattataataattagatgaatggtaagactttttttagtctttatttttgataaatataataataattaagctataagtataatgtacatacacgtgattatatcattttataatatgtccaatattatctttcaaaacctcagccttaattgctccactaaattagacatattattttcaaaatctcagctttaattgctccactgaaccaaaacaatgtaatattgcaataaaatttattgttacaacaaaaactaaaatctatagcgataaagttacaattagaattttggatggaaaaaaaattagagttcgatttttttttttttaaaaaaccttagaatattatagagagctccatttaagcatgtgatgttattgtttttaattattaatttttttaaaaaaaaatagtgttcactatagatataaatacatatatataaggtgttttggataagtgaacattacattctgattttagataaacaacctaaattattatactatgtaaattgaatataacttttgtaagaaattcgcaatattataatttttttgccatcggagaatgctcgaaatatgtttcgaaataagtttcatatacaatatagttttacaacttttgaaaatttatttatttggatgaaaaataacgcattatatattctttattttagttacatgtaaaaataactatatataaaaatagcgtattgtatgtgggacaatatcaattatatctttgaaaaccatagttttaaaaattgagttatataaagataaaaatacatatttataattttgaacctataacataccatggtggcattacatgaatcaaatgaaagtttgtcaatgacattgcaaaggtatcatgcaattcactaattattatattcatagagtatttattgtatacataattattcatgtttgttttttcacatatatctatatgtcagatcttattcttttctccatgaacttgattctactaaactaatttgaaaatcaaggttcgcgtttctagactatttgaggtcaagaaccataaaaaaaaaggagaaagtttgataagtcttgatatggtcattatggatgaagaggtatatttttctcttaaacaatattttcgattactagtagaggttagttttatatttaattaattatatttatgataccgtcattatgatctttttttcactttctcatttttcattctatatgtgtatagtatttatgtgccattaaaagttgaagttgtggctgacactcatgttatccaataatttttttgtcatgcatctattaaataagtaccatctactttcttcaagtatggtgttcttcatgttaaaattgtgttaactatgttaatcatatcaattatcgggatactattttataatagacttagctacaatatttagtttaatattagaaaataaaagatttatatatcgcaataaaaaatctagatataagagtataatgacaaatactttatttattctttttctacttcaataatgggtttgagcatggtttttaaggaaatgaaaaaatgggtagtttagcatagaggtacccctttaattaacaagtgtagggaataagtaaatccttaataaagtaaacacaattataagacaattttatgagtaattaatgatgagtttattaaaataaagtaaagataatattgtcaattatagttattttttttactaaaagtggaatggtccaaataaataaaactacccaaagtggtgattattgcaatagaaaaagaacagaggaagtatgtcaataaaatggtgttgaaaaatctcattttacagcaacacaaaatcaacaatgttaataaaaaatttgaaaaaaaataatataaacaagaacccgtgcgattcaaaactagtaaaaaggatttcggtaaaaatatgtgttttttttttttttacagaaaaaatatttgtattggagataggaattgggaacggaaaaggaatcctaatttattgagtaacgccttggttgtactacatttcaccacttttaaccatccggctgttcaagaaattggatcaagttgatctgatccgaaaaatctgatatccaatccagtatatcttcgaaaagtctgattctagataaatttataaaaaaaaaaaattagaaatataattatggtagatttgtaatgtatttcatgttgccttagatagtaaacttaattgtattaacgtttgcggattccattcaacttttttttattttgaggcactatataaggtggtcatgcaatcgtaaggtcatctaaaatcgtgaactgtcatgagtgtgatgattctatttgtcaagcaattttttttccgttcattgtgcttgacaaactcaaacagtatacgaactcattttagtatctacactcaatagcaccaaagacaacaaaagaaacttcattggaatttttcagatttagtatcttgttatctgattggaactattccgatccaagattttgggttgaatcagatatccgttttgaaccgccctagactcactaaatgacctatcacaatccagctgatctcacataaactccacactatgagctagtctaatcatagacaccataccaatagcagtaaattaagtacattaattttgaccttcaatagacaatacccaacaaatcttgctcatgcttaaagattaaaaagatactaatctatttagacttaaataattcatgcaattgccttcatgttttttttggtaaggagaaaacaacctagcattgcccctataataggaccaacctagagcatcctttccagtgatggaataaaacacaatgttggaagaagaaaaccaatacaaaaagcgaatgagcctcgtgaccatgatgcgccatgtgaaaagcttcaaaaaccctttagctgatcataacaattacttgcatgatgataacattcatgtgttctcttcacctgaataacccttaacttatttgaatgagcttattgtacctaaattgaacatattagacatgattggacctgattcaacttattggacctgattgaaccttattggaacttataattggacctgattgaaacttatttgatccgattgaaacttattataccttattggaattaattgaaacttattagaccttattgaacctgattgaaacttattagaccttattggacctgattgaaacttattagaccttattggacctaattggaacttatttgaccttattagacaaaaaaattgattagttataacataaatgttacccctaacgtactaccccttacaatttattatgaaataataattattaaaaattgctctttaaaaaaaatattattattaattatctcttacgataaacaatttaacaaaaaaaatatattatttatatacttgtctatatataactttcaccagtaatatatctaatagtcttgttaatagtaatatgaataacaaaataatagaccataataaaagtataatactatacattgtggtactttaattcaaaaaatttaataataatataatcaactaatagtaatatgaacaataaaataatagacaataatacaaacatttaatgaaataatagacaataatataagtataatacgatttaattaatcattgtggtactttaattaaaattctaataataacataatcaactaatagtgatatgaataataaaataatggacaataatacgaatgtttattgatcattgactatttggaccttattgaaacatattggacttgattaggcctaattggaatttattgcacctgattagaacttattggactttattgcacctgattggaacttattggacctgattggaacttattggaccttattagacctaattggaacttattgtcctgattggatctgattgaaacttatctgaaccaatctgatctggactgaacttattggacctgaaacttaaattattaaggtgatcaagaaaacgcaccctaaatttcatatttgttgctaattattcagtttctctgaatttcctattgacaaatttataaactattagttactaaacaagtaaatgaacttacttacataaatgaacaccatgaaatcattaaggctacgtttggtacggcgtaaaatatttttctggaacattgttttcttttattttatattttacattgtttggtttgcaaagtagcataaaaccatttttcctagaagtaaaattgctcttccaatgatggaaaattattttccttcgtttttcttatttctcctttacacacccttccctaccttctttttcatttttctttcttttcatcagttttcttccataaaaccaaacaactgagaattaatcttggaattgttttttctatcataaaatgtttttcatgaaaagcattttacaattaaaaaaattatacctaacccctatctagtagtagaataaacaaatgccaaactgtttttctgtaaacatttttaaacaaggagcaccagtggtctagtggtagaatagtaccctgccacggtacagacccgggttgtgactagaattgtagcattaatcttcacattggccaaacaagtaaagaaagtcacatttgattcataaattaagtgatgtcatttattttattatttatattatctatactaatatattaaaaggcgtgcggaaacaaaaatgaatttttttcttatattatactccgtttacttgtaagttataagttactattttatttataccatcctaaattagtacaatattttttaaatttaggtgttgtttgactcaacttattttcatttatctgaatttgtttaattaaacattattacgatatctagaatgatacctttaaacaagaatactaaagattatgtaattactagtatactatgatggagagatgcaaactgatatatctattaaataatcaaacatttgttcccttttaaaaaaaatcaaacatttgttaagcatgtctataatttattgtgtacactgcaaatcaagtgtaccaagaactattttctcttttatatggagcatcttttgtttgctgctccattagtactactcaaatgtgcaagtgtgctaaaaattatcagggatggtttttgacccatgcaatcacggcgacggaattgggcaccaaaaatataatggacccaaaatatatttaattttaattatttgaagattagacaaaagaaaacatttggatcaacagtaaaagtataagtgaaggaataacgagaacatgaaattcaacaaagttttgttgtttaactttttaaagataatcgtcgttaaccaactgtaaatataaatcttatacttttatcttttttaaactacaaatgaaaggcctgattaaggaaaaaatataagacccccattacttttgctcatatttgtcccgctcttgaaaattatatttagtacaccattttcaattcttgtatatgaaagacggaaaagattgttgaaaacttggttttataacatgacaatttctagagaattaccatttgcaaccccttcactattgaataagacaagtttaccatattctcctctaaatttgtataaatggtctaaaaaattgaaaatgtcattaatggactttcatttcatgttatggcagatcattgcattgaaatggacactaattgaaattgcaatcactgtcgtggtcactcttctcttgtgggcttccttggtcatggcaaattactgacataatgtcctggaaggcccaatactattttgtcatttttttgaaactttgatttctacaaaatactctttagtctgctctacatttattcccagttacacaagtgctttcaaggaaactatagcaaattatatggataaatgtaaacagttcttcacatagtgaaactgtaagacttttgggacttacaagatctctacaaaatagctaaaatcttgaatagaattcttaagactgcaaaaataaaatgagtgtaatacttgatcatattggagaccgtaaactactaagttatatggattattgtgtgaagcattcagtggagatcgaagcaacacttaaatgtgaaagaagaatccatactacttgttttgtgtggagagatgctaacttatctttcatgtctttgattcagctcttagatatgaaacatatcagcaagtacattgctatgaaccattcaatggagatcgaagcgccacttaaatgtgaaacaagaatcctctgcactattgttgtgcatcttcaccatagacgctaaattctctttcatgtgtttatttccgctcgtagcttcaaaatcttctatgttatgccaccaaaatttattgcaaaactgctcacaacaacatccatctcggcatttcctagctaattttttacacaagtactgcaaaatcaaaggaattctttgtagttttgcaagtatacccaattaataagtagaattttatgctaaaaaacaataaaataacaagatccatctcaaaatcacccctaataagttccaaccaggtccaataaattctgtttagttcagttcaagtctaataagttcagttcagggttattcaggtgaaaagaacgcaccctaagtctccatgaaccctcaattactatggagatgaggcactaatagtagtcagctcagctctcagctctcagctctcagctctcagctctcagctcaaccacctaagctcagcacctagctcagttcaataagttacttcagttgagttagttggttctcctaactaactatattcaactacatattatgtcatgccttgctggtagcccttctgattacattctttcatataaatagttctctccccttagattgtaattcggttatgttagttcacaatattctgtcattttgtaataatagagagtttcttatctcttcaagattcttctttcttatcagtaaaacttcttctatattgttgttgattataattgatcacatttgatcaactaacaatcaccctttattgctctcaatacccctatgatccgtctgaagatgctaaaatcctaacccaccttcctgtctttactccagtcccgattcccactctgtaatagcccatctctctcctctgcttgagaaccccgcctcagcagtcagcagtcagcagccagcttagctttcggactgtaatacagttggggggtgaagggtggcggtaaatctgagactcgaaatatgttgacagtttacagttggggtataacagtgtttggccccaataactaattaaaatcttagaaaatcttatgtataaaacctcaaacaacagctaatctatagtataaggataagatcagtacctcaaccataccacgacaatagccaagtatagtcaaggtagttggataggtgctccaaattagcccatccacaaaagctgctgaagtttgttttgtgagataattttgcctcgccactttaaggtgaacattgttctgttgggaaggccgaattgttgctccaaattcattgagtttgaattccaccttcacaattgatcaaaaacacagacaagtaaactatttaacagcacatctgaatcaaaagttgacacatcaaagattgcactcctgtacctgtatcatggactgtatccatgagttgtaccttcttgagtcaaatacaaaggtcaaatagattttttgtcctgctatatgttccataaataccctgaagcagatgaaccacgatgtatctaaatcacaagaaagacgaaaatgcaacttaacaaggcatttgtcagttggtaagttaagtttaagtattgatggtacttggtccccctcatagagcaactcccttagatttgggcaatcgataaaaaccatcttacaaccaaaaccacggtatttgaaatacctcaaattcggacaatcaacatgaatctcgtgaggattaaattctatttctaacttacttagatgataattagctgctttaaaccaatctgcatcaacttcttcttgcacaagctttgctttctcaacaagtggaaaatcagctgtaaggtctccatatacgatataattgtctactaagtggagatccctgataggattatctgagctgaacaataattccaaataagtagtacaagaaaaactctcaaggtttacacattctctgatgtcaactttaccaataatattgccatactgaaaacccttaacataggctttctttagcttatgaaatatagaaagcgtgagagttccaatcccaaaagtgcaacattcaaactctaaaagttcaatcaatgggcaactacttgccaagttgcttatggtttcctcattcgacacaaaaacatgtgagagccacaattgtttcaaagaagaatacatcccgaccacatagtttccaacagtggatgataatcgacaacctcgtacagtaagagactgcaaccattttgaagaaacaagtatttccaggtaaggaaaatcataacatgcgtcctcacgtatttcactataccaacgaaagtcttttgtttgaacaaaaatgcacaactcctcaaccttagtttgtctaactagattcatcaatcgatcaacatgagaaaagtcagcattattaacaaccagattcaatgttaattctaaaactggcgtatgttgttgatttatagtcaacaagcgattattcacaaaattcatgaatttgtcctttatttcctcactttgagcagaaagtggtagtccccaagcaaataaagtctcatcaaaatgcaaaaattgcacaatttcgtatgaagaacatacagatttccaggtcttggaaagaacggatgttcgaatagcatcttttatgagaagaaatgatagtatatggtggattatttcctccggcaatttcgaaattcggtccttgtgattgatgtaatacatcttttctttatgagattcttgttcttggtatcttattcttcgacaaaacagatgttggggtaacagtatactgcacatgtaaattacaccattaaagttaccctctaactggtcattattatcagatttatttaagaatgaggagatgaaagattacacacttctttccacaaaatgaaaaaaatcagttgagcaagaaatatattaaaatcagagctatacaacaaacattagaagattaaaaatatgaatggtaagagaattaaagaaattcacctaattgacttcgttgaattcttgtaatctcgttaccagggatttgggaagagtgtgattttcaagaatggccttgattgtactacagttcaccactcttaacatatattcggtccggcatatattcgaaaagtctgattcttgacaaatttagaaatatacactttatatggtaaatttgtaatgtatttcatgttgccttagatagtaaacttaattgtattaacgtttgcggattctagtgatggcgactagtccgggctggcagaccaaattgtgggctgtagcgggctggtctgagattccatggtccaggaccggactatgaaattcatgtgttggtcgggctagtccgtgggctgaaaaatcttgactcacaccgatctgttaccggtttccacggttcgggaagcgattttggcagttcgtgggtctagtaggctggatcggggtagcgagccgacgtgaattttttttcaaaattatttaatcattgaaattattcgttattgttacataaaatctttaaaatgacataaaaatacttcctccgtttctaaataagtgcaacacttcttgttttcacgtttgccaatgcattattttatccattaatatcttcaattatcaataagtaaaaattataaaaagttgatattaaaaaaattcacattcgatggaatctaacaagatcccacatgactatgtttttcctaaaatgtaaatcatcaaagctaattaaagtttaaactgtgaatagtaaacactatgcaaatgttgcacttatttagaaacggaggaagtatacaattattaatattaatgaataatttcattaatttgaaatttgattgaatcataatatatacaatttgattagaatatatacaatttgattaaaatatacacaatttggttcaatatttacttggactagactgggttggtccgattcatgggccgggctagacagttttagtagcgggttgtgcgcaaaaaaatctggtcatgacccacccacccacccatttaaaggtttgagctaggctggatcgggattttcgcgagcccgacccacacgacccacgaggtgggctgggctggattggcccgcactgttggccatatctagcggattccattcaaccttttgattctgagccactatataaggtggtcatgaactcataaggtcatctaaaactcgttaactgtcatgagtgtgatgattttatttgtcaagcacttttctttgcgttcattgtgcttgatactcaaacagtatacaaactctttttagtacctacactcaatagcaccaaagacaacaaaagaaacttcattggaatttctcaaatctgggatcctgttatctaattgtaattatttcgatccaagatttaggatcggatcagatatccgattcgaatcgccctagactcactaaatgacctatcacaacccagttgatctcacacacacactccatactaggagttggtctgatcgcggacaccataccagtagcagtaaattaagtacatcaattttgacctccaatagacaatacctaacaaatcttgatcatgcttaaagattaaaaacatagtaatctatttagacttaaataattcatgcaattgctctcatgtttttttttttttctttttgataaggagaaaacaacctagcactacccctataataggatcagcctagagcatcctctctggtgatggaaaaaaaatacaatgttggaagaataaaaccaatacaaaaagtgaatgagcctcgtgaccatgatgcgccatgtgaagagcttcaaaaccctttagctaaaattagatacatttcataacaattacttgcaagatgataaaaatcatccattaaatcttagatttaatttcttgctaattattcagtctatctgaatttcctattgacaaatttataaactacagttacaaaataagtaaatgagcttacttacataaatgaacacctttttttatattaaggctacatttggtacgacccaaaaatattttcctaaaaaattattttcctttattttcaattatacattatttggtttggaaagaagtatacaaacattttccctagaagaaaaattactttttcagtgatggaaaaaccattttcctttcaaaatgaagggaaaactggttttccttcatttttcttatctcttctttacacacctctccctacctctttactttcttttttatttttctttcttttcatcatttttcttccatgaaaccaaataacggaaaactaattttagagttgtcttttccattgtaaaatgtttttcaggggcggttcttggcccatgcagtataggcgacggaatagggccccaaaaatagaggggccccgaaatatatgatatgtattaaatggttgaaagaaaaacaaaaggaaagcatttggatcagtggtaaagtggtagagtatggggaaggggcgcgggttcgactccggttagaagcagttttttttactttttgttctttcgactgcagactcagcagtcataacctactcacattaataccaacgcatgctttttttctttggcgcttcaaattcccaattttccattaatgattactctctcctctctcttcctaactctttctcattaatttctattcatattcttatattttttttgcaattttccaataaaatttactcttaaacttcaattcaacaaatttgccagagaagttcaagagatgtatggttttgaattgtattacaacggtttaatcttcacttatttcatgaaattgaagattaaaccttcatcaatttatatagggacatcattcacctccctaatttccctatataagcaactctcaagacatgcaatatgtaccaagcaaaattcagcttatcgaaatacaatgctgtattggtactctgaattctaatatgcgccattcacctccctaattttagagttgtcttttccattgtaaaatgtttttcatgaaaagcatttttacaatgaaaatgttttacacccaacccttatctagtcttttaagaatttgataatgcttccttttatttgaccacgtaaatttaatttgggcccactaaaccctaggtctattatattacaattattcatggtattcacaaaaaggtctgccctacttattacccaaatttctcgctttgattgacgacttcatcaaagtcaccccccaacaagccaaggttttttcaaattatgagcaaatctttcaaggtcgttccatagaagcttcctattctaaacttagtacttgcataaattgaaggacaaaagaagatttagtagatattacctcaactacactgtagactccccgtgcaacttctccaatgacttgcaaatccaagatgtttgatttccaaaaaagaagaataacgcctgtagaacccattggttcgagcaaatgccaagtgtcatagctaagatccctaatgatcccagtcatctcttccctgcccacaagtttcgtctaagacaagcaacgacgggtagttttataaggtcatatataacttatgaactatcatgagtctgatgattttatttgccaagcactttttttgctgttcattgtgcttgacaaactcaaatagtatattaactcattttagtacctacacttaatagcaccaaattaaagacaacaaaagaaacttcattggagttttttagatctgtgttatctgattggaattattccgatccaagattttcggtcggattagatacctgatttgaaccgccccagactcactaaatgacctatcacaacccagctgatcttacacaaactcaacactaggagctagtctgatcacagacaccataccagtagcagtaagttaagtacattaatttcaacctccaataaacaatacccaacaaatcttgctcatgattaaatattaaaaagatactaacagatttagacttaaataattcatgcaattgccttatgttttttttttttggtaaggagaaaacaatctagtactacccctataaataggaccagcctagagcatcctttccggtgatggaagaaaatacaatgttggaagaagaaaactaatacaaaaagcgaatgagcctcgtgaccatgatgcgccatgtgaaaaaaagcttctaaaaccctttagctaaaattaaagatattccataataattacttgcatgatgataacatccattaaaatttagatttgttgctaattattcagtctctctgaatttctattgacaaatttataaactatcgattactaattaagtatgaacttacttacataaatgaacatcatgaaatcattaaggctacttttggtatggcgtaaaatatttgcctggaaaataattttcctctattttcaattttacattattttgtttgcaaaggagtgtaaaatcatttttcctagaactaaaattactcttccaatgatggaaaacaataaaaaattattttccttcatttttcttatctctcctttacacacctcaccttacctcctttctttatttttcatttttctttcttttcttcagttttcttccatgaaatcaaacaacgaaaaactaattttggaattgtgttttccattctaaaatatttttcatgaaaagcattttacaataaaaatgttttacacccaacccctatctaatctttcaagaattggatgatgcttccttttatttgtccaggtaaactctaggtctattagattacaattattcatggtattcgcaaaaaggtttgccctattctagacacaagtttcccctaaatttctcgatttgattgacgacttcatcaaagtcacccacaacaagccaaggtttattcaaattatgagtaaatctttcaaggtcattccatagaagcttcctatttttaaacttagtacttgcataaattgaaggacaaaagaagatttagtagatatatattacctcaaacacgtcgtagactccctgtgcaccttctccaatgacttgaaaatcctcaaagaagaagaataccgcctgcaaaacccactggttcgagcaaatgccaagagtcatatcccagatccctaatgatcccagccgtcttttcccgacacacaagtttcggctaagacaaccgacgacgggtagtgatgttgttgcatgagaagcctaaaattaggcttaaaggagggcacgacaatgcctctaacattccaaaacagcaccgtcattcccatgtattagtggtgctttttccaggagcatcttgagtatcgcctcattttctagtactcatgggtctacttcgactccggattgtgggcatgttcacatctttctgtgcggccaaagggctaccttggcctcacatgagttttttttttatgtcgcttgcttctccctaagtcgtcgttagtcccaattgttttaagggtctgtacaggcgtgttaagagcacaacattggtgttgctcaaaactatcatccgcacctctttctaccgaaccaagatcatggtgcggaccatcgccaagagtagtattggatccacccacgggtctaggttggctaagaactctctttcttcgctctctaatcctccctctttctttatattaggaacaatttccagaattttttcatgaaagggggaaaatgagtggcatctcgaatttgtagcacatgagctgggagaaactaggagcatgaatacatcatcaagtgacctagttttttttttctggtgtaggaacggtttggctgttagcactttcacctcttgccatgcaagttccgtgtggaactcgttcgagttcccgggacaatccgggagataaaaatccattgcttccataaacaacttcgattttaggggtcttacttaccaagagaagcaaatcgggtcgaggcttttcaccgaggatatcttcgattctggtgggggagtttggaggtggggatggtggggaaggggggaaatatctggacaagtcgagatactctgggtctcttagcatcatcacggtggagctgagttgtttgagctggggtggttttttgaggggacgtttacctcagagctactgccatgtttcagcatgcgaaaggaggaaggggctacctcctgcaaatccaaaagcatatcaaacatgttatgcgtttgggcggatgagtttgacaaaacactaggccctctgaaatttttggaaagatcttttgcagctggcccatccgatttcctaggggaattatgtaaaagaggtagttgagtattctgttgttctgccgccttttgtatttcttttcccccaatagttttcttgagagtccacctagactatgacctatgtctcccatttttatcttcttgccctttattgcctctttcttcgcttggttctcaccaaccctattttcacgagctcctagctagggtttcatctttctccttctcttccgatttcttattttttcatgttatggcccacccgacgataactattgcacaccgactgattctctgggtagacgaggtcttgacacgtatgccttaaccatgcccttgccggtgtattggagttcactttcataagaacgcagaagattgcaaacctccttcggtcaccatggagggaatgggcatcgatttttataatgctcccaagagtatttccaatagttttcaatatctccttcctaaaaaactccaggggcttccggagattcacccaaaccgggtattgagtgatgctttcttgggaaggcttgaaacccggttgccgagcttatacccaaatttgagagcccataacaaaccatggtcccacagtcaaaatgtgagatctctcttccggtgatgggaattttgtacagtaaaaccaacgacccagcgatatctctatggcccctttccatgatatcatagtttctggagttcctatttcagataatcttgggagaatgaacaccccaccactttgcttataatagcatcaacccacggtttaacaagctcaacatattggctctcatatattggtatgaaaacttcctcctcaccacaaggatgagggtgagagtagagatgtaaattgatcgggttcgggggggtggagcatcacccgctaccatccgcaccacccgatccatccatcacccggaaaaatcaccacccgaatccatccatccatttacttccgggtgaacggatggatcgggttataatcgggtgaaattacctcaaaataatgctaaccataaaatttcagaaaaataaagtttcaaccgataaaaccatagatccacaaccacaattcaaattaagttcaaaatcacaagaatttgcatataaaaattaggaaaattaggttgggcattgggcttttagatttggacatttagttgggccttgaggattggacctaaaaaatatttttttaaataaacgggtgatgggtcggattaacgggtcgggtgatggatgaaaattgtccacccgaatcgatccatcacccgcatccgttaatccgtcacccgtccaccatccgtttaaaccgggtttttcacccgtccattaggacggatggaccgggtgaccgggtgaccgggtggtccactggatattgccatctctaggtgagaggatgcaaaaggaagcgggggtgaagggaatattcaccgtgatgttatggtttttgttgtataatatgagcactataagagggggggtgaattatagtgagagaataagtactactttttgcggaattaaaagtaaacttgggaacaaacaatgggaacacgagagattttacgaggaaaaacttcctaggcctagtaggaagaaacaacctcgaccacaagggattttaaacaactttccactataataggccaaaacaactcgattacaacctattacttttctctcgattctcaacttaagtcactcaactcaagttcccaacgacagttcccaacaactcacgttttctctcaaacttcactcgaagttcctttctctttctcttgcttcactcaaagctttctcacacttacaagagttcactcaaaccctttttctcaaaaatacactttgtaaaacaatggaagagtaatgaaaactcgattaatgtaagtatgaattctcttaaggaaaggcacctgacactttagataacttaagacaaattaactaagtcgacacactttttggtgtgactaataaaagtcgagacacactttttctcaagtgaattaggcgcctatttatagacttttaagacaagacatgatttccactaacttagatcattatcacatgttctccatgatttctaattaatttaattaaattaaattatttattctaagtcatgtgcatcatccactaacccattatctcacttcatagaagcaagaacaaagtacgtggttttgcaaacttggagaataattaatcttatttaatttaattaaatacttgaaggataattaacttatgccactaaatccactaactccataaacttgaagcaataaatcacttaggcgtgtaagctagaatttaggaaataaataaataaaaatcctttagctaatttttaggagaaaaaatctttttcgaaatcttttacaaaaaccggaaaacagattttttatttcgaaaaatccgaagctcttaaaaaccggaaatatatattttttcgaaaactaaatcttttaaataaaatataaaagataaatatatattttaaaaagataagatttgaaaatcagagatttttaaaatcgagaaaatctatttaaaatcttttcctaacaaacttaaactaacttcctaaaattatggatcttagtcaaattatccctaaaaactctaacaactatattgggcacacaaataccttaggcgcacaatattagtcacttagtagttcctaaattagttttaaagtcttgttccctaattattaagtcttgttcctaagccttgttcctatagtgccatgtctgttcctttcatgggaacagaaccaagttcctttgagaattcaccacgaacttaataaagctattactcaaccttaacaagaagattaataaataccctaatgtattctaatcttcattccatgcttgattcttcatttctcgaacatctttacttcgatcttgattaattctccgctttaatcttcaatcaagtattctcttagctcgagcatgaattaccttgcaacaacataaataaaatatactatgtcttttgtggttaggtcatcttcaaaactcaagggtcaacaatttccccctttttgaagatggcaacaaaaggcatatactaaaaataatatatataagtcatataaaaataattttaacaaagtatgtaaccaagttaaattaactattatagactcgttattgtattttgtaaaatcgaaatatgagaacataattcatgacaaaaaaaaatttactctgatttgccttatctttccccctttggcatcttcaaaaacatagtccacgatttcaaaagatgaatattattcactaaacacatcacaccaccaaacttgtaagaaataagttggttagtataagcaaataaagcattcaactctcaaaaaccgcaatccaagaatattagccattcatttagacgcacacatgcaaaaagatcaaacttagaattaagcaaaccaagaagttccattgtagcatgagtaaaggagaaggatagaaaagacaaatattaaacaaagttcatgttcccacacaaaataaaacaagctaaatgagaaaattttatggtttaggagagggaggttgttctacttcttccaccacatcatgaagctttgccatcacttcttgatgattttcggccattgtatcatttcccttgagcacaatttcttccaacttcaacaatcttgagttcatagcatgaatcgaggaagaaagttcaccaagccgagccattatttcttgttgtccatccaaggctttgtcaactttgctcataaccccttttaccaacccatttaaatccttagcttccgtagcaaactccatcattgcttccgaatgacccataaccaaggaaaacaaagaatccaaccttccggcatgagctagagtatatgtagaaccaatggtaggattttgagaagtcgagggagcttgagaaggcttgggttttgcggtttgttcctttggtttgggaacagcaggttgttcctctagaatgggaacaccaactgtttccttagctttaggaacagaacatgagggtttagaggtagagggagggatagtatcatctcgtggtgttagggtagagggtgaggcagatttttgtggagatggaggaaaaggaggattggtttccatgggaacaggagtcggttccctagaaggaggtaggttagattcataatcttccctatcaatcacctttacttcatcttcctcacaactttcttgaaatcgagaataggaaaattaagcactttcatattttgaaccctttgactagctctagtgctcttcataacctaagtttcaccacctcatcaaccaccttcttccctttctttttagtttcttctttttctttttcaattttcttttctttttgatttttcttttctttttctttttcgattttcttctcttcaacttctttttcttcttcttcttcttccacttcatcatccacatcatcatcatcctcatcatcatcaagattagcacgtcccttaataacttctccattcacaacacaaacatttaagttattcaaggcacgcacattcaacatatttcccgtggacacacttatggatcgagttcccgaaattttcactttaaacttaagtagaatttcggttactaaggctccatagccaacaacaaatccattttcaatgcaatgactcaaatgttgaatcattaacgaaggaaagtttatgtgtttgtgagaagcaagacaatgaatgtaaattaaatccaacatgctaacttgagcacgtttggaaaggcgaggcaataaagctttcttgaggatgtgaaacaaaattttgtgataaggggaaagaagattatggtcaagaaatgtttttcctttttgacctccatacttaacaatcaattgatcaaaggaaatgtccgaaaatggataggaaccacgttgtttcttgaaatacacatctgttcctctcacgggaacaccaagcagtttacccaaacttttagcattaaaatcaatttgagttcctttcaccaatgtggaacaatttccttcttcatccatggaaaagttttcacaaaattcgtcccatcaatttaggaatcaaactatttccataacatttcacaaaaagattttcccaaccttgaaacttaatcatattaagtaattgacgaaagtttactcttttgcaccaagaaacatcaataaaaagtccatgcacatacctagttgccgtggagttttttcgaacaacccgagttgttcctctctctagaacatccgattccccctcactagttgcatgagcttcttcaacctccatttcaaccgattcttcttgtttcttccttttccttagaattcttgatgaagaattgggagaaatatccatgggtgttggtgattcaattttagaggatgaaggagagggtttttcggctttgtgggaggagagagagtgatgagtgtttttggtagtcatattttgaggagtaattttcggttttatgagaaggaaggaaaaaaaattgttttgatttaaggaaagaataacataaaaccgtgtttttacacgtgtttaagagaaaaaaaatcttaaaagaaatatcttcaactaacttgagagatataaggaaaaatcagatttttttttaggaaataaaatctgaacaaaatatttttggtttttcgaattttgaaaaaaaatctaactctaatacgctgggaattgggaacagcgtttgggaacagtgaatgggaacaatgaaattttgctactttggaactccattaattcttttaatcctttgttatcacttaaggcatagaattgtcctatgaacaataaggggaatattattggacattggtgagcggttatcgatatttttacttatacatatgaaataatcatataagaattgtgatgtatttaggcaaataaaaacatcaaaaatgcacatcaagacataatgccaaagaattaacacaaaggggaataatgtagcaatcatttcaatttaattaagccaagttcgagtctcaatttctcaaacctatctctatttaagggtttggtcaagatatctgcaatttgacgttcgagtctcacggaattccattttaataagacccttttcaacattatctttcagaaagtgatgcctaatatggatgtgtttgactcttgaatggtgtacgggatctttagaaatactaatggcactagtattatcacaatagatgggaacacattcaaagtagattccatagtcacgtaattgttgttttatccatagcatttgggaacaacatgctgctgctgcaacatattcagcctctgcttgtagataaagcaatcgtgtttttgcttcttggtgctccaagaaactaaactatgactaaggaaccgaaccatacccgatgtactctttctattgaccaaatctcctgcatagtcaagatccgcaaatactttcaattcaaaggtatcactcctcgaatagaataggcttaaatcatctgttcccttgaggtatcttaggattctcttcacagctgtgagagatgagattcctttggattggcttggaaccttgcacataatcctacaccgaaagcaatatcgggacgacttgcgcttagatatagtaatgagccaatcatacctcgatatttggtttgatccacacttgttcctatagaatcttcatccaatctagttgagattcccataggtgtatgattaactttggatgcttccaaaccatactttttcaatagttcctttatgtacttttgttgatgaatgtagattccttcttctgtttgcttgatttgcaaccccaagaagaagttgagctcacccatcatactcatttcaaattctttactcatgagattagcaaagtccttgcacaaagattcattagtagcaccaaatataatatcatcaacatatatttgaacaactaataaatgttttccttttgattttaaaaacaaggttcgatccaattttcctcttttaaactcattttcaagaaggaacttagaaagtctttcataccatgctcttggagcttgctttaacccataaagagctttgtcaagcttaaagacatgattaggaaattctttattttcaaaacctggaggttgttctacaaatacctccttattaagataaccatttagaaaagcacattttacatccatttgatacaatttgaaacccatgaaggcaacaaaagctatgaagattctaattgcttccaatcttgcaactggagcaaaagtttcttcataatcaatgccttcctgttgattgtatcctttcacaactaacctggccttgtttcttatgataattccaaactcatctaatttgtttcgaaacacccacttcaaaccaataaccttgttgtgtttaggcttaggttcaaggtgccaaactttgtttctttcaaattgatgaagttcatcccgcattgctacgatccaatcaagcatcggtgagagcttcttcatgattcctaggttccaacatagaaagaaaagcatgaaaagcacaaaagtttttcagttgagatctcgtttgagttcccttatttatgtcactgattattagttctacaggatgggaacgatgagttttccaaggctttggttggaaatcctggatggaaacttggtttccttgatcatcttcattttcctgtacttgggaaccaggttcaacaatagtggattcattcactagtgcatcatcacttagttcctcttcttcctcattgggaacaggaacaggatgttgttcccttggctttgttcccatgacttcgtcttccaaagtctcatcaataagacttaggttttttgtcaatcctatttcgaagtcatcttcaacctgtgtgcttgcatcaaatttatctgtttcatcaaaaataacatgcacactttcttctacacacatagaccttttgttatacactctataagccttgctactagaagaatatcctaagaatacagcttcttcactcctagcatcaaattttccaatattttgtttcccattattatgaacaaaacatttacatccaaatgttctgaaatatgtaatattgggctttttaccaaaatacagctcatagggcgttttatttaataaaggtcttaccatggctcgatttataatgtgacaagcaagattcacagcttctgcccaaaaagtttttaggaagtccactagctatcaacatagtcctagccatctcttctagtgttctattcttcctttcaacaacaccattttgttgaggtgttctaggggctgagaaattgtgatctaatccattgtctctgctaaagtcatcgaacttataattttcaaattctttaccatggtcggatctaaggtgaagtaatttatgaccactcaaattttgtactttctttgcaaagacaaggaactcatcataagtctcgtccttgctagaaagaaaaataacccaagtaaatctagagaagtcatctacaattactagcacatatttctttccacttctactttgtatcctcataggtccacataaatccatatgtagtaactctaaaggtcttgtggtactcaccacatttttggacttgaaagaggacctaacatgcttgccttttgcgcatgcatcacatacatgatctaaaggaaacttagtagagggtaaacctaaaactagttctttagaacgcagtttgtcaagcaaggaaaagctagcatgacctagacgcttgtgccataagagtgaatcatcatcaataacactaaggcatgtgaatttgtttttgggaacaaggttgagatccacaatatatgtgttccctttccttgttccttccaaaatgatatcctttgtgctattgttgactatcaaacatttttcactattaaactttacacattccctctatcacagaattgggatatacttaacaagttatgctttaatccatcaactagaaacacattttctatggaatgtgacgatgacttaccgactttgcccatggcaactatgttacctttcttgttgtcactaaaagtcacacttccaccattgtaggctgagagtgagagaaatcttgatttatctccagtcatatgcttagaacaaccactgtctaggtaccatgtgttgttccccctcactccaacctgcaagaaaactaattgttagagttaggaacccaatctttcttgggttcctttccttcagaacaatagatttctttttccaagttactttacttgtttccaagttctcattgattcgtccaagtcttttaggacaagagttcctaaaatgaccagtgttcccacaaaacatacaaactttatcacttggtaaatcaactctctttttaggtttttcaaacttctttttgtgattaaaaccaagaccttgattcgttttgtttgaggattcttaatccagtttggaatgggtagcattttcttttcatttctcatttggtacagttccccttcaagttccttattttcaatttccaaaaatgaaacatgatttttcaattcgtttatttcgatttaaaactttgcaaggaactgacttaatgtcaaatgaacttacttcaggaacaaactcttttagttgtgtcaactcaaggctcaacaagtagttctcatttttaagattttcaaatcctcttttaatttaagatttttgtcaaacaattcaaaaaatcttttctcaatatcaactcgaacactcttaagccaagaggtatgttcctttgctacacttaaagcattttgacattgttttagtctaatggtttcatctttgcaatcatttacaagcgtcaacaataaactcaaataatttttctttacttaaagaattaagacgagttttgatggtgtctagacttgcctcaagagattcaatctcttcatcgattcgaattgtcaagagccataagacagaagtttgcagcctcctcattttgttgaggatcatcttcttcctcgagtcgagtctccccatgcaaagcaaccatagctttcttcatgtcggatcgagtataggagtttttgtattctttgttcctatctctgctctgttcccttcctttgcctttttcttgttcccattggggacaatccttgatgaagtgctcggaatcgccacacttatgacaaacaagtttgttagaatatttcttattcttacctttgtagtcacctttcttcatgttcctaaacattcttttgaattttcggaccatgagagcagattcttcttcatctgtttcgagccttcactttcattagcttttaaggcaatcgacttttgcttggacatatctccattctcattgtccaattggaactcatgagtcatgagggaaccaaagcaagttgttccaaattgaactttgtaaagtccttagtttctgcaaggcgcttaccttagccatccaacgatccttaggaaggctccttaggacctttcgtactgttcctcgagatgtaatcactttaccaagagatgttagctcattaattatattagtaaagcgtgtaaacatatcttggatagactctttgatttcatttgaaaaagttcatattggttcatcaaaagatctatttttgatctcttaacttcactcgtaccttcatgagtgacttcaagaagatcccaaatttgttttgcggttttacatcccatgacacgattgtgttcatgaggaccaagaccacaatgaagcaattttatagcaagagcattaatttccatcttttcgaaatcagctttatcaaaatcgagatatagatttaggaattacctcattcttgtcattagtggtagtgacttcaaaatcacctacctctatgactctccatacccggtagttgtcggctttgataaagatctccattctgttcttccagtaagtgtaaaacttaccattgaacattggtggcctctgtgtagagtacccttcttccagtttctctctctagtattcatatttttcaagatcttgaactcgacaggggtttcctgaatattagagttcccgctctgataccaattgttgtataatatgagcactataagagggggggtgaattatagtgagagaataagtactactttttgcggaattaaaagtaaacttgggaacaaacaatgggaacgcgagagattttacgaggaaaaacttcctaggcctagtaggaagaaacaacctcgaccacaagggattttaaacaactttccactataataggccaaaacaactctgattacaacctattacttttctctcgattctcaacttaagtcactcaactcaagttcccaacgatagttcccaacaactgacgttttctctcaaacttcactcgaagttcctttctctttctctttctctttctcttgcttcactcaaagctttctcacacttacaagagttcactcaaaccctttttctcaaaaatacactttgtaaaacaatggaagagtaatgaaaactcgattaatgtaagtatgaattctcttaaggaaaggcactgacactttagataacttaagacaaattaactaagtcagacacactttttggtgtgactaataaaagtcagacacactttttctcaagtgaattaggcgcctatttatagacttttaagacaagacatgatttccactaacttagaccattatcacatgttctccatgatttctaattaatttaattaaattaaattatttattctaagtcatgtgcatcatccactaacccattatctcacttcatagaagcaagaacaaagtacgtggttttgcaaacttggagaataattaatcatatttaatttaattaaatacttggaggataattaacttatgccactaaatccactaactccataaacttgaagcaagaaatcacttaggcgtgtaagctagaatttaggaaataaataaataaaaatcctttagctaatttttaggagaaaaaatctttttcaaatcttttacaaaaaccgaaaatgattttttatttcaaaaatccgaagctcttaaaaaccggaaatatatattttttcgaaaactaaatcttttaaataaaatataaaagataaatatatattttaaaaagataagatttgaaaatcagagatttttaaaatcagaaaatctatttaaaatcttttcctaacaaacttaaactaacttcctaaaattatggatcttagtcaaattatccctaaaaactctaacaactatattgggcacacaaataccttaggcgcacaatattagtcacttagtagttcctaaattagttttaaagtcttgttccctaattattaagtcttgttcctaagccttgttcctatagtgccagtcctgttcctttcatgggaacagaaccaagttcctttgagaattcaccacgaacttaataaagctattactcaaccttaacaagaagattaataaataccctaatgtattctaatcttcattccatgcttgattcttcatttctcgaacatctttacttcgatcttgattaattctccgctttaatcttcaatcaagtattctcttagctcgagcatgaattaccttgcaacaacataaataaaatatactatgtcttttgtggttaggtcatcttcaaaactcaagggtcaacagatttatattgagttttcttccctaattatgtgctaaaagttgtgattatggtgctcttaggagccatttggtactaactctctccatctagttgtggtttgctattttgtattgaattgtaggttttggaagctatcacctactttacatgattgcacaaaggattagaggggttagatgccgagtttctagatcacgaggatgatttccgggactttgagcaaagaaagaacaagaaacgaagattagctagaccggcccgataggatcgggcggcccagcccgatcgggcgagataccagttctcatgcttctgctgcgggcccgatcgggcgttttatgccctgtcgtaattcggtctttcgcccgatcgggcgagttggcccgacgtcgggcgccattccagcaatctgcctcccattttataagaccgcccgatgacatcgggccggtcagcccgattgcatctggcatctggcgcttttggccttaatcatctgctttgaagcccgataggatcgggcgacctaggcccgatcgggcatctgacgagacgcggacttttaatgatttcgggcccttctttcgagattttcttctattgttttagggcttgtataaatagaaaaatcagaattatgaactcctatctagtttttattattagttttctccatagagtgtttcaagaaccttaatttattgctttgtgatttcaattcaagatcaaactttttgcttattcatagttcaatataattcggtaatctttcttctttacttctttattatttcttccattgttaactatattgttttcttagttatttgccatgtttccaagtatgaatttttatatgattcttgttattgatttcatgattatgagtgagtagttctatatctagacttgtggagatctatgtatgcaataagggattgatagattagtttgattatctggtatttcaattgtttcctttgattgattcttcatgctaggattataagttaggcctgatttatatttctacccttgcaatactgaatctacttcgagaggagagataccgtataggcttttaattattaggcaaagtgacccttgactatgcgagagcggctgggtgatctttgagggaggtaatgttcgagagaaattacatgtgccctagacaattgacttactaggtggttatcgtttatccttgatttcccaaattgtatgcatagtgatccatgattctagtactttagtgatatatttacaccttcatatttaattacatttactgtttagcttagtatcacaaccattcatccgattttgttagtataatattagagttcagatacaatagtataacttctccctgtggattcgatcctgacttccctgactattagttagtggaccttaggttatttttgattaggtgatacgactttagcctgtcacaccgctatcttaagttggcactccgccttactcctaattgcctctttgaatgacctacttttagacgaggttgcagaatggggggagggggaataggtggacctaggagaggagggagggaaggactggaacgggacttacatcggcatttgctcgaacacaagggttatgcagtaggaggctccgacatcgtctctcctcgtgttatgccgtgtggccgggttttggtgggtttttggtgacttaagggagagagaattctctctctaagattctctctgtaattaaagcccattgatttcgtctttttgaaatgattgttcttttaccaaattaaactttagttgatcgaaaattccataataccatttagttcatggagcttgggataagaacacaaaatgtatgggcatgggctagtacctaaactatcatataaaagatttgcatagcactattaggagcaaaggtggagcaagctttgggaaggcaggttttactatccaggctatagaactataaaattacttcacttatattacacttattacagactctactaacctggtgactttttgtagggaacaaattcagttggtattaatcttatttggacattctcagattctaaatctcgctaaggagtctccaaaacataaaaattaggttatagaacgatatatggtccttttgatgtggtactttctcaatcaactatatgactttaatgaagaaagacaatgttatagtgtttggttgtcaaagttgctaggagggatgtgaatcgagctcctactattgtcaagtagtgtgtggaatctatgtccaatattattttgtaatttttggtttattgttttgttctttgatcttatctttataaaaaaaaaatcaataataattactccatttaatttgttcaaacattttaagcaacttcagaaaattgttgattttatttttacagaattctaaaaacgttataaatgaattttgtttgattgttcactcgtactttgcaattctacttcgcaacaagttccaccaaaatagaaactgttcacctttgttctaaaaaaaatataattttgcaaagtatatataataagttataattactgtactatacttaataatatttccttccttactcaaattaaagaccttcttatttccacttgttatgcatggttgtcaatgtattatttgtatgattaatatctctaattacatattagtaaaaactatacaaatatgatattttgaatgtattcaattagatgattcaaacaataccctatgtggagttgtcattgcattgctagattatggggagaaagttgtcatggctcctcaagctgtttcacctatgtggagttctcgacgtcttaaggtaagtcatctattaaataatcaaacatttgttaagcatgtctataattttttgtatacattgcaaatcaagtgtacctagaactattttctcttttatatggagaatcttttgtttgctgcatgctccattagtacacctcaaaatttgaacatttcttcaatgcaacaccccaaaataccattttcaattcttgtatatgaaagataagaaaacattgataagttacaaagacaaacatggaaaagattgttgaaaactttgtttcgtaacatgacaatttctagagaactaccatttgcgacccccctcccatagaataagacaagtttgtcattttctctaaatttgtataaatcgtctaaaaaattgaaaattgttatgaagtcaaaaagtaaatgtcatgtatttaatacgtagtaagtttttcataaacctacatactagggtaatgtacacatgtttacttgtaatacatgtcttgtagtataaatatgacgtttgccataagtagtaatacatagctttgggaagaaagaatcactttgttattttcactctataatctttctgttccctttatttcacaacaaaaatgtcataaaatggacttctatttcatgttatggcagatcatcgcgttgaaatggatgcctattggaattgcaatcaatgttgtcgtcattcttctgttgtgggcttccttggtcatggcaaattacgttgctttgtgctcgtgacataatgtcgtagaaggcccaatacacttttgtcatttttttgaaactttgattgctacaaaaaactctctagtctgctctacatttattcccagttacacaagtggtttcaaggaaactatagcaaattatatggataaatgtaaacagttgtccacatagtgaaaatgtaagacttttgggacttacaacatctctacaaaatagctagaaacttacacagaattcttaagactgcaaaaataaaatgagtgtaatacttgatcatagtcatactattggagaccgtaaactactaggttatatggattcttgtgtgacacattcaatggagatcaaaccgccacttaaatgtgaaacaagatttctctgtactattgttgtgcatcatcaccatagacgctaaattctctttcatgtctttatttccgctcgtagcatcaaaatcttctatgttatgccaccaaaatttattgcaaaactgctcacaacatccatctcggcctttgctagctaattttttacacaagtactgcaaaatcaaaggaattctttgtagttttgcaagtatacccaattaataagtagacttttatgctaaaaaaacaataaaataacaagatccgtctcaaaatcacccctaataagttccaatcaggtccaataagttaaattaggtccaataaaatatgtttagttcagttcaagtctaataagttcagttcagggttgtttaggtgaagagaatgcaccctaagtctccaatgaaccctcaattactatggagatgaggcactaatagtagccagctcagctcacagctcaaccacctaagctcagctcacagctcagctcaataagttatttcagttcagttagttagttctcctaactaccttctgattacattctttcatataaatagttctctctccttagattgtaattcaattatgttagttcacaatattctctcatttgtaataatagagagtttcttatctcttcaagattcttctttcttatcagtaaaacttcttctatattgttattgattataattgatcacatttgatcaactaacaattaccctctattgctctcaatacccctttgatccgtctgaagatgctgaaatcctaacccaccttcctgtcctaactccagtcctgattcccactctgtagtagcccatctctctcctctgcttgagaaccccgcctcagcagtcagcagtcagcagtcagcagtcagcagtcagcagccagcttagcttccggactgtaatacagtgggggtggagggtggcggtaattctgagactcgaaatatgttgacagtttatagttggggtatgacagtgtttggccccaataactaattaaaatcttagaaaatcttatgtataaaacctcaaacatcagctaatctatatataaggataagatcagtacctcaataataccagtacaatagccaagtatagtcaaggtagttggataggtgctccaaactagcccatccacaaaagctgctgaagtttgttttgtgagatgattttgcctcgccactttaaggtgaacattgttctgtcgggaaggccgaattcttgctccaaattcattgagttcgaattccaccttcaaaattaatcaaaaacacagacaagtagaatatttaacagcacatctgaatcaaaagttgagacatcaaagattgcactcctgtacctgtatcctggactgtatccatgggtcaaatcttgagtcaaatccaatgctcaaatagattttttgtcctgctatatgttccataaataccttaaagcggatgaaccacgatgtatctaaatcacaagaaagacaaaaatgcaacttaacaacgcatttatgagttggtaagttaagtttaagtaatgatggtacttggtccccctcatagagcaactcccttagatttgggcaatcgataaaaaccttcttacagccagaaccacggtatttgaaatacctcaaattcggacaatcaacataaatcttgcgaggatcaaattctatttctaacttccttagatgataattagctgctttaaaccaatctacacgaatatcttctatcacaagctttgctttctcaagaagtggaaaatcagctgtaaggtctccatatacgagaggatggtctactaagcggagatccctgatattactaccaccatctgagttgaacaataattccaaatgagtagtacaagaaaaactctcaaggtttacacattctctgatgtcaacttcaccaatttcgccatactgaaaaccctcaacataggctttctttagcttatgaaatatagaaagcgtgagagttcccattccaaaagtgcaacattcaaactctaaaagttcaatcaatgggcaactaattgccaagttgcttatggtttcctcattcgacaccaaaacatgtgagagccacaattgtttcaaagaagaatacatcccgaccacatagtttccaacagtggatgataatcgacaacctcgtacagtaagagactgcaaccattttgaagaaacaagtatttccaggtaaggaaaatcataacatgcgtcctcacgtatttcactataccaagaaaagtcttttgtttgaacaaaaatgcacaactcctcaaccttagtttgtctaactagattcatcaatcgatcaacatgagaaaagtcagcattattaacaaccagattcgatgttaattctaaaactggcgtatgttgttgatttatagtcaacaagcgattattcacaaaattcatgaatttgtcctttatttcttggtcttgtccagcactttgagcagaaagtggtaattccgaagcaaataaagtctcatcaaaatgcaaagattgcacaattttgtatgaagaacatacagatttccaggtcttggaaagaacggatgtttgagtagcatcttttatgagaagaaatgatagtatatggtggattatttcctccggcaatttcgaaattcggtccttgtgattgatgtaatacatctttttcttcatcagattcttgttcttactatcttattcttcgacaaaacagatgttcgagtaacagtatactgcacatataaattacaccactaaaagttacccagaaactgatcattattacacaaaattacacaaaatgaaaaaatcagttgagcaagaaatatattaaaatcagagctatagaacaaacattagaagattaaaaaaatatgaatggtaagagaattgaaagaaattcacctaattgacttcgttgaattcttgtaatcttgttaccaggatttgggaagagtgtgattttcaagaatggccgttgtatacagaaacaggtcctctgtacaggagaaatgaaaaggatttttgtaaaagtatttgtatttgaagataggaattggaaatggaaagggaatcgtaatttattgaatagcggcttgactgtactacagttcaccactcttaagtcttaaccatccggctgttcaagaaattggatcaagttcatctgatccgcaaaatctgatatctgatccgacatatattcgaaaagtatgatacttgacaaatttataaataaaatttagaaatatatatatggtaaatttgtaatgtatttcatgttgccttagagagtaacaatagggtgctttctcttcatctgaataactctgaacttatctaaattgaatttattggacctgaactgaaattattagacctgattgacccttattagaaattattggacatgattgacccttattagaacttattgcacccgattgaaatttattgacctaattgaaatttatcaaaccttattggacctgtttaaaatttattagaccttattgagtctgattgaaacttattagaccttattgaaactaattggaacttatttgacctttatttgacgaaaaaattgatgagttatagcataaatattacccctaacgtaaatagtatccctcaaaatttattatgaaataatcatcattaaaatttaccctttaaaaaaattattattattaattatctcttatgataaacaatttaacaaaaaaaatatatactatttatatacttgcctatgcacaactttcaccactaatatatctaatagcctcgttaatagtaatatgaataataaaataatagacaataatataagtataataatatacattgtggtactttaattaaaaaatttaataataaaataatcagctaatcgtaatatgaataataaaataatagactataatacaaatatttaataaaataatagacaataatacagatataatacgatataattattgtggtactttaattaaaattctaataataacataatcagttaatagttatatgaatgataaaataatggacaataatgcaaatgtttattgatcattgactatttggaccttattggaacttattggacctgatcagacctgattgaaacttattggacctgattgaaacttattggaccttattagacctggaccttattagacctggaacttattgccctgattgaaacttatctgaactgatttgaacttatccgaactgaacttattggacctgaaacgtaatttattaaggtgaagagaacacacccttaattgtattaacgtttatggattccattcaacttttttattttgaggcactatataataaggtggtcatgtactcataagtcgtaaggtcatataaaactcgtgaactgtcatgagtctgatgattctatttgtcaagcactttttttgcgttcattgtacttgacaaactcaaacagaatacgaaatcattttagtacctacacttaatagcaccaaattaaagacaacaaatgaacaaaagaaacttcattggagtttttcagatctgtgttatttgattggaattaatccgatccaaaattttggatcggatcagatatccgatttgaaccgccttagactcactaaatgacctatcataaccccacaaactccacactaggagttgttctaatcacataccccatactagtaacagtaaattaagtacattaattttgaactccaatagacaatacccaacaaatcttgctcatgattaaagattaaaaagatactagtctattcaaactcaaataattcatgcaattgccttcatgtttttttggtaaggagaaaacaacctaacactacccctataataggaacagcctagagcatcctttccggtgatggaagaaaacataatgttggaagaagaaaaccaatacaaaaagcgaatgagccttgtgaccatgacgcgccatgtgaaaagcttcaaaaaccctttaggtaaaattagagatatttcataacaattacttgcatgatgagaacatccattaaaatttagatttgttgctaattattcagtctttctgaatttcctattgacaaatttataaactttcggttactaaataagtaaatgaacttacataaatgaacttcatgaaatcgttaaggctacgtttggtacggcgtaaaatattttcttggaaaattattttcctctattttcaattttacattgtttggtttgcaaaggagtgtaaaatcatttttcctagaagtaaaattgctcttcgaatgatggaaaataatagggaaaattgtttcctttcacttttcttatctttcctttacacacctctccctacctcctttctttcttttcgttagttttcttccatgaagtcaaacaacggaaaaataattttggaattgtgttttccattctaaaatctttttcatgaaaagtattttacaatgaaaatgttttacacccaacccctatatctagtctttcaggaattggatgatgcttccttttatttgtccacgtaaatttgggctcattaaaccctaggtctattagattacaattattcatggtatttgcaaaaaggtttgccctacttctagacacaagtttcccccaaaaatttatcgctttgattgacgacttcatcaaagtcacccacaataagccaaggtttattcaaattatgtgtaaatctttcaatagaagcttcctatttttaaaactttgtacttgcataaattcaaggacaaaagaagatttagtagatattacctcaaccacgccgtagactccctatgcaccttctctaatgacttgaaaatccaagatgtgtgattttcaaagaagaatattgtttgcaaaacccgctggttcgagccaatgccaagagtcatagcccagatccctaatgatcccagccgtcttttcccgacccacaagtttcggctaagacaaccaatgacgggtagtgatgttgcatgagaagcttaaaattaggcttaaaggagggcctggcaaggcctctaacattccaaaacaacaccgtcattcccttgtgtagtggtgctttttccaggaacatcctgagtatcccctcatttcctaatacccatgggtctacttcgactccgaattgtgggaatgtccacatctttttgtgcgtccaaagggctacctggcttcacgcgggttttttctgccgcttgcctctcccaaagtcatcgttagtcccaattgtttcaagggtctgtacaggcgtgctaagagcacaacattggtgttgcttaaagctatctttctgctgaaccaagatcatggtgcggaccatcggcaagtaggggtgttcaatgtcggatatcggatcggatccgatccgaaaattccggatcggggacatagcgatccgaatccgatccgaaattttcggatatccgaacttttcggatcggatcaccgggtttttggatcggataccgggttttcggatcggatcaccggattttcagatcgggtccgttgaaatttttgaaaaatcccgatccgtatccgatccgaaaactcgaatttttttccggatacccgatccgaaatatccgaaatcttaaaatcggatcggatatccgaaatttcggatcggatcgacggattttcggatcggatatttttgcacacccctatcggcaagattggtattggatccacccacgagcctaggttggctaataactctttttcttcgctctctacccctccctctttttttaggaacaatttcaagaaaattttcatgagaggggaaagatgagtggcatctcgtatttatagcacatgagctgggagaaactcggagcatgaatacatcatcacgtgacccttttttctggtgtaggaacgatttgtctattagcgctttcacctattgccatgcaagttcaatgtggaactcgttcgacttgtcgagacaatccgggagataaaactctattgcttccataaacaactttgattttacgggtctcgcttaccaggagaagaggatcaggtcaaggggtttttaccgtggatatctttgattctggtggggagtttggaggtggggataataggggaggggggggaaagatccggacagtttgagatactctgggtctcttagcatcatcacggtggagctgagttgtttgagctggggtgaattcttgagcagggaggcttttgtgaacaagtttaggtgcgttttgaaacttccatggcagtaatgatgtggttggggggttatatagtgggttagagttggaggccagcttggcaggtacagtgtgcaagggaagttgggtaaagtgtggcgtcaacggggaacaaagaaggaggttgggttcagagagaggggtgactgaggggacgtttacctcagggctactgccatgtttcagcatgcaaggagaggaaggggctacctcctgcaaatccaaaagcatatcaaacttgttatacgtttgggcaaatgagttcgacaaatcactgggccctcctagatttttggaaagatcttttgcaggtagcccatcagatttcctagggaaattatgtaaaagtggtagttgagtattctgttgtactgccgtcttttgtgtttcttttcccccaatagttttcttgggagatcacctagattgggacctacgtctcccatttttctcttcatgccctttattgccttttgacttttgtctcttgacttgggcccatgtatttatcacgtcactttcctttgcttggttctcaccaaccctaatttcacgagctcatagggtttcatctttctccttctcttctggtttctttggacatctcttcatgttatggcccacccgacgacaactattgcacacctactgtttatctgagtagacgaggtcttggcacgtacgccctaaccatgcccttgccggtgtattggagttcactttcataagaacatagatggtcgcaaacctccttcggtcaccatggtccgggagattccagaggctccaggagattcacctgaatcgagtttgagtgatgctttcttgggaaggcttgaaacctggttgccaagcttgtacccaatggagagcccataacaaaccatggtccctcagtcaaaatgtgagatctcgcttccggtgatggacattttgtattgtaaaacccaaggcccagcgatatcatctctatggtccctttccatgaccattgtttatggagttcctatttaaaataatcttgggagaatgaacgccccaccactttgcgtataatagcatcaacccaggatttaacaagctcaacatattggctcttagatattggtatgaaaacttcctcctcgccacaaagatgagggtgagaggttgcaaaaggaagcgggggtaaggggaattttgatagcgctatcttgaggtggtactccacctcactcctatttgcctctttgaataacctatttttagatgaggttgcagaatggggggagggggaataggtggacctgggagaggagggagggaatgggacgggattcacctcggcatttgctcgaacacaagggttttgcagtaggaggctccgaatctctcctcgtgttctgccagtgtgggcaggttttggtgggtttttagtgacttaggggagagagaattctctctctaagattctctctgtaaatcccattgatttcatcttcttgaaatgactgttctattaccaaattaaactttagttgatcgaaaattccataataccatttagttcatggagcttaggataagaacgcaaaatgtatcggcatgggctagtacctaaactatcatatgggagatttgcatagcactattaggagcaaaggtggaggaagatttgggaaggcaaattctgctatccaggcgcaagctctcttcacttgtattacacttattacagactctactaacctggtgactttttatagggaacaaattcagttggtattgatcttatttggacattctcagattctaaatctcgctaaggagtctccaaaacataaacataaggctatagaactatatacaatccttttggtgtggtactttgtcgatcaactatctgactttcatgaagaaagacaatgttatagtgttttgttgtcaaagttgctaggatactattgtcaagtagtgtgtggaatctatgtccaatattattttgtaatttttggtttattgttttgttctttgattttacatttataaaataatcaatcataattactccatttaatttgttcaaacatttaaagcaacttcagaaaattattgattttatttttacaaaattttaaagacattataaatgaattttgtttgattgttcattcgtactttgcaattctacttcgcaacaagttccatcaaaatagaaacatttcacctttgttctacaaaaaaatataattttttcagagtacatataataagttataattattgtactatacctaataatattcccttcgttactcaaattaaagatcttcctattttcacttgttacgcatggttgtcaatctattttttgtatgattaatatctctaattacatattagtaaaaaattatacaaatatgatattttgaacgtattcaattagatgattcaaacaagaccttacataactatgttttttttttcttatacggtagaaagaatttagaagattctattttttttaacgaatagtgtcaaatttgcaaatgtgaagatcttagaagaaagaagagagtatatagtatttcatcgtaaacaaaatccaagttcttttatcctaaacattgtacatgtatttaatgtttaactctctaaaactttataaaatttataaaataatgaaataaaacataggtgcacgacaaatggtgttaaataaggatgtcaaatgtcacaaactcgtgcactgcccgtgaattatgtttttatatgttagtaaatgtctataataaatttatctttactacactattaaaatcagggcaataggaggatgagtgctcaaatttgagcaataattgaaagaataattgtcatagaagttgagcggcgaagcatattaattaaaatgaggataggacgacgtgaagcacacaaataatggaaacattttgacgcacaaaatgaatattcatttaatgatttaggtatttaactatgcatttatgtgttaaagatcacacaagaaaacacaacacggacattatcacaataaacaatggtaaaaagtaatagagccaatttgttcaatcgacaactagagtcatagataatgagttggtgtttagaagacaagttatgatcaaaagagaactcgttgttgggcatggacaatgcatcagataatttaataagataaaaaagatgtatagtttgatattagcattttctcacaagcacaagtcatagtttcgtggtaggatcataatatgaggacaaagtaagatttcacgggtcagagacctcttatgctatgttcgagacagtacgacattattacatcaacgtatgacgtagggtgacatgtgatgacgtacaataattgcccacacgttttaaattatttacataattattgaccaattatctgacttattatgactattaatctgattcacaaggaaggcaattattatttatttatagggttaatttgaagcatgcatttatattatttacatgatatatttcattggttattgatggtcgttagtacagttcccttttttttctattatatggggtcaggttgttagtataattagaactttataattttattaatagcttaattgaataacaaattaaattagctgatccttcatgacaattattgtcaaggaacaattgactaaatattctctttcagacctagctcaaaaatacaaaagctctcttacaccacctagaattattaattggtttggtactgaaaaggtattaattgctagataatatactccaaacatgaagcacacccaaaaaaaaattgatgtgatgatgcacacccaaacttgaaatcaatttttatttttaaaaccaacattattattatgctttactgaatgacctataatttgtaagcaatagattttccgacaagcagtggttagtgaataccaagaatacaataattcattttacacaaattcttggggtgtaacaacctataaaccatcgcttctttttatataaaaaagaactaaaataatatgaaataaatggcataatgacaagaatttatgtcattatttgtatagttcatgacattttttattggagtctatgccattatgcatgttacacaattagttattggtgcaacatgtgacacccaagacgcactcgttattatgtaaggcactcgttaatgcgtttgataatgttgtgtggtcttatgtaaactgtagaagcaataaggtggcttgtgaattagctcataaagcttatttggagatgaatgacgctatttgggatgttgattttcctagctttgtttcttttggtgcttgttccgatctattaaagtaagctctcctttaatggatttcctaaaaaaaaaaatcacttaatcaagttaactcaactacctcccaatcatgaaatgagaggattcgattctcattgtctaaactataaagttgacatcatatgcgtcgtgactcgtggttcatttctgtatggattaatgtcgagttgccgacttattctttatataaatgatttggatttcttaaatgctaattccactccaatttctatggcctaataaattttaccttagacaaccagaataaacactaagcacaattatcgaaccgtctctttttttgatgaattaacgattatatacattaaccgctagtctgctactcctactcatgttgaagatcttatctgtaaaaagttttttgttttactaacattccgcaaccattacttataatttactccaattgctacccgttactacaaccactaccttactaaacactcgtaattttcttaaataacgttttaatcttgtcaaaccgctattcattacctcaaacactagtgtcaaacagggcctaaccgtacagactagtctaacattctaaccattatactttgtggacatattaagagaaacttaaataatggtcactgtgcaacaagattccctacaatcgaataggatttgttccgaaagaatcaaaattcttatttgctgaatgtcatcatcttaaaatgcatgatacttgaatattattatggcaatacttgttttatatggcagcccaagagccacctatcattttttgatgacttaattatgggtgccctgaatagttatgtagtctgagaagtcaatcataaaagtcaatgacaacccttaagggactttaattaaaaagaagtccaaatttgcatgagttgtacaaacttatatgcatatttcatgcaaagttatgaacatttcttatatatgaccatgtattaaaaactcttccatgattcctaaaaaacacaaaaaaaaaaaaactcttttatgaatgagttgttaatgagctaaaattaattttaagtgcattgaaagttaggtacctcaaacgaggaaagattataaaaggggcttgtcccacttaattttgagaataaaatgtcaaatacacaattacaaaccttataaaccatgaaatttcaactgacctagtggtgaagcaagcgagattaattgcactacatattatatgtgcgtgtaagtttgaagttgatatcctatatatgtcaaaagatagtgcttgactgcttgcactatttattatctaactagtattttggctcgggagatgcctcggattttctctgtgctccaatttagtagtagttaaataagtcatctcattcattttatggatttcaatagttttccattcatatatcatcattaattttgattgaaaaagcaataattgtatggtgaagtaaggcttggatctctttctttcatactttatattaggttgtgggttcaaatcttcacgtcaacaatctttttttttttactacatgagaaagacgtggataaaatgtaattgaatgacggatggtgacacgtggcacatatacgttcttaggaacgccttttgatatattagtacaagctttttctacatgatatgcgtgcggtgacattttaggcttaactattactcggtataaaaagaaatgaaaagtaaaattataaaagtacgtatctacgttcaccttcatttggtgagtaagaagtatttaaatacttacaaatattatctaaaaacatttgaaaagtaactataagtgacaaaattgtatattcaaataatgaaaaaattgaattttttttggagtttgtatttgtgattagtctctattgtataagccaggggggctatggtgtcccccaatgaaatgtcttttttgtccttagcgaaatatatacttaattgaatattcaaattttatacaactatatcctttcctaatttaaagatgggtcaaattttcaataatatactaaataagcattaaaaaagtaaattgacatactaaggaaaataattactcaataaaaaaaaatttaatttgactataaaacttatatctaaatgtttatctcaatttctaaacactttataaattacagtagtttgtataacaataattataaatcacacttgtataattatatgttgaagaaatttgctaagtatagatccaaacaatcaacgcatgtatcgcgtgcatagaagactagttttgtatgtgagttgtctttgtaataagaatgcaatatttttttaattgtctatattcatttttggtaagttttttattacaaatttttttagttgattggatctaaatttaatttgattgaatcttttttattggcaagtttatgtgattgacaactgtatgagttgattggatttaatagagattttttttttggtaagtttatgtgtgtaatggttttaacttttatgttatggaggggtgaatatgtaaattcaaaggggaacaccattgctccgcccttggcttatataatagagatagatagatagattctatctattccttcttttaatttcttcttttttaattggtttttttctcttaattttttcctatatcttttgcttctagcctatctctttcccttattttgagaagtccttttcctttatggttaccattttagtttgcttcgcttattacctttgaagagtgactagttttttaacaatttcaaactgtaattaatatttgggttttttcaccaaatactcccgacaaattataaaattcacaatataccctcaatgtttcaaaaagtgcaccgtatacccttgagtttttgaaaacgtgcaccaaatacccttttcccaactgccgttaacctaccgttagctttatttacgattttgccatcattaagccctaaccctaatctaacctaactctaaccctaattcttactctaatcctacccctaaacccttccccttaccctaaccctaactctttggctgcccccaccccagcccctcccctcccccacccccgctgcgcgtccgttcaccgctagcctcccccaccccgtgcgcgtccgttcactgccggcctcccctcaccccttccctgtcgatttcccggccctgatttcacaacccttcgaacgccaaacccccacctctcccctttgaactctcaaagtctcaaacatcaccttgttatggtcggcggtgaaatcggcggggctgggaatttccgatagttggggactcaaattccgcagagaaaactcgtgtgtgcttttcggttgttgcggactcaattttcggcagcggttttcgaattcgaagggggggggggctcgaatttggccgcgaaaactcgaatctgaaggcgggtgttgcgacggtggagaggaggaggaggggtgcaattggagggggagggggaccggtggaggggagggggtgggggctggtggagggtgggggaagggtgggttacggtttagattttagggttagattaagattaaggttagagttagattaaggttagagtttagggttaataatggcaaaatggtaaattaagttaacgctgagttaacttaagttaaaaaagggtatctggtgaatgttttcgaatagtaaggggtatatggtgaatatttggaacattgagggtgtattgtgaattttgtaatttatcgggggtatttggtgaaaaaatccttaatattttttttctcaaataccttcctaactgtttttcgatatagtattttaaaaaaaatggtgcatcgatacaaatgttatgcttttattttgttgtgagttcataaatcgatttgtagttgatttcattacaaggaatgaagaggaaggagaaaagaaatggggggattttaattatggtattaattgaattattttttcctagagtagttttgtaaaaaattatcctaattaaagtttcttatcctatatcttgtagcataggatagaaaaatcctagaaggattcaacaaaatgtaattcggaatttgcgtgattattcctatatatcctcagtttcacaatgatttactcgtcatccttattggcacacttcaaaaaaactttactcttttcacttttaaccaatttgggcgataggacccaccatttattctcctattatccaatgtcacatgcatgattatatttctcttctttatttactttttggaattgttgtcgtctcattattagcgtccaaaagtacatattgttgacttgcaaattctataatcacgaaactggacacaaaggttgcaacacctttgagtgggtgtgtttctagaatacctttgtctggttctgcttttcgctattgaagaaaaaaaaaatagtgctaagctctacccattattgtgattaacaacgtaaccatcaaatcaaaacgaatagagttaatgaaaagaagcagttgagtaaatgctcaccataattcttgtcacctcttcaatggaagttgtcgtggaagagtgatgatcgccaacttatgagtagggtggtagagtagagttctaatagaggagagctctcatctccattagaactctactctgccaccctactcatgagtcaaagaataaaaatgggttttttttgtttactttgaggcttggttgggcttctgggtgagtggccttgtgcgaaggcggcccagaggtaattcttcttacccgggtccctgaatgggggcccaaaaaaaaaaatcaattttttttatacgggtcaaaatgcttacattaatttcttcttgaaaattatataccaaaagatattccaaggtgtacctcacctcaaaaaaaaaaaaaaaaaaaaaaaaaaaactctcaagaccttgtccaacgatagtaatagaaagcattccataaatatacatatttctccacataaaaagtcataggtataagatttatttattcataaaatcggctaatctaagctttaaattccaaaggaaggacggctgttcaatttccacacacatcatctttctcttcctgcagagtgcaggcctctgctctctcattctgtttacaacttttgagcttaatgctctcacttgccttcctaatataatttcattcatctttctcttcaatttcttcaactgcttttcttcaaataaagtgatttatattattaattattatatttaccgttagtagttaccttattaaaatatatatatcctaaaatggggtacaaatcattggacaaaacaaagcatagaaaaggtttatggtcacctgaagaagatcaaaatctaagaaattacattcttcaacatggccatggctgttggagcagtgttcctattaatgcaggtacattttttatttgataatatttataattattatacttactagtttttttttttaattgcatacccctatattgttgttatagtaattatgtttttggtcatttttttagatgacttgaaaattaaatagagccttgttcaacgtagaattatatgctcttacactattcgtctattccttagactttgagtgtttcctttaagtactccacatacaataaagttttcgccactaaattaactaatgtttgatgttataaatttaaagtaagatattaataaataaaaattataatgatctgggaaataggcatataacccgagccaaaaaactaatttttctttatatcgaagcattcttctttatatatggccccattgctccagcgttgcttatatttgagtcctttaattatcaaaagtattgagccaaaaaaactaatttttcttatttgaagtgcatggtgtcctaattattgatgaaagaggtgaatgggagctgcattatgaataatgtgaccatttccaagctgcttaatcatagctaatttctaaaaacttctttttcaataaaaacaaataatgtatgttcaaaaaaataatttggggtgtcatttgagtaatgagtatatattttgatgaaaaacttgaacatgatattgcttaagaaaactctcgcttcaccattcgtactactactaatggttattccctccttagatatttatagtctgatgacgtcgatctaataaagtactgtagtttatgattagattttacaatatgtaaccatggaaaattaatagagtattaaactatttatggaattctaaccataatcttaaccttttagttgagttgatccttttacaaaatatcggaaccagcgatatataaaggtcacgaattcaaatctcatccatcccctcttttgaggggcttgtgctgcatccacacttcaagtccaatgggctctcgcgtgagggggcatgatagagtattaaactattcatgggactcaaaccataatcttaaacttttggttgagtcggttctctaacggaaattcttttaaagctatttagagatgcaagggatttcttttatgaaagtaattctctgtttgttctcaaatagttgtacatttaacttccatgattacctataccttatgctaaccattaatatcttgatatacatagtattaaaaatcatcatattttgttatgtttagaagaattaagtaaaaaagtgtgctataacattataaaaattatataaaaaaggatttagggtaaataatttataagtttgaccagaaaagtgaaattgccacgatcaaacttataaatgagactatgtatgaactgattatggataattggagtttgatcgtggcaattttttttttttgttttttttataagaatggttgtggacatttatttttggagagataactaatttatattcctctaattatacttcctcctttaactaattctttatcacaaaaagattttaacagaaaaaaaaagcgcagaaaatatataatagcaaaattttatcctccaccttaatttattagaaaatgcaccttagttcattagaaaaggacctttatgctgagagcacaaacgaaggatgattcaagcacttttggttctttttggccagaatagaacatactattagaataagtaagacagcatcttgagtcaaaaataactagaatttaaagtgtacaagcaaaagattgtgacaatgacttaatatttttaataaaaagtaaatatacaattactccaattgcttttcaagttgacatttatctgagaataattacctcatcattcttcttagtctttagaatttagaattttctaaaagatatagttacttccttgttccttcctttcgtctaaatacaataaaagagtattacttgtcagatacaaaatatatatttattgtatttaacaattaagcagaggaagtatatgaaaatcatcaaactattcttactttaattttcctcataaattaattatcattcaaattttcaggattacaaaggagtggaaaaagctgcagattaagatggattaattatttaagaccaggacttaagcgaggcacattaagccctcaagaagaggacacaattctaaaccttcattgtgctttaggaaataagtaagtgcaatttaaatgaaatctcactctaaaaaaaaattccaaaactttgcatttataattggaaacctttcagatgtaagagttaattcattacagagtttgtcttgtaagagaccgcctacttttaaattaaaattaggaaatggtaagcccaatattaaaaagagaattagctcgatagtaattaggttaatttcttttagtgactaatttaattcgtttagtgactaggtctatttttatattaaaattagaccgtctcttttaataatttttacacattacatcacaatataaagttgattttacaaaattatttctctagaaaggtattcatgacaatttagcaattggcaagaacttgatttatatgattataaatttatatgtggtctccatgaaatttgccaaaatcatgtggtaaaatgaaataagagtttcattggatacttctatatcgggcatgaatttaccaatgcaatgtcaatttttttatttattaaagttgctttattttggcagtctcctcctaggttaagttactcttggcatcaagccatatttgaacatgcagacaaatgctaccagctactataatgccaacctaatgagaaacaaaaccaaatacccaccattactaaatttggcaaagcattaactaggttatctcttacccctaaattatgactaaattagaagtatgattgtaatttgtatagtaattaaccaaaagcatcatccctaaaaaaaaagcctcatgaagcaatacgttgtaatattcgctaggaaatagaaacattttctaggcaatacatggctaattcaatgagcacttccacttttaaggtaattttttcatggctaattcaattaaaaattcatgaggggttgataacaatatttataatcactttctaatgtaatttcacttttaattagtaaaaatcaccatgactacatcaaagaaaagcactagatatacaatgaaaagagttctaatcaacaataattagtttcagctaaaaaaataattactaaaatcaggtttgatagaatatacgcaaatattgtcttgtacctaatttacgctaatgtataacttttaggattgatgtgtatcttaaataggtataggacaatattggagtatattctatcaaggtcaatcaattatagaaacactttttgtggactaaaaattagatgaagtgaacaaagtcatagaaatattttctttttactttacgttatgtcgacctggtctaacaaataacctattaatcaaagaaatacatgccaaataaaaatgtaatatttagctttgttcctcatatcacctttataaacattaaacaatcaccttaataataactgaatttgcaagttcttaggaagacttgatctttaacaaaaacttggctcaatcatttgcacacaatgcatgtaagctagtcctagagtcgttactaggaaggcgcatccaaatatccaatgcctaaatgtctgcaaaatttttaaatttgattaccatacatttctcccttgattattacttatgaagaagtagatagcatgtcatgattggcttaattatagtatgattgggctttggacccttatttgagctctttatattaccttgaaatttggcccacaatgcattgtccagatatttaaacctcattattctcttttcatatatacttcctccgttttttatcagtttacccatttttttgcacaaaattttaggagaaataatgttgtgagacataaaaggaaagcgaaactattattttatgttagagttgaatgtatgtgtgatagaaagttaatggtcacattccaaaaatataaacaaaagaaaactaataagggacatccaaaaaggaatacgggtaaactaataaagatcggaggtagtaattaataagtgtagacatattctattatctaatctaaccatgtctctctttaatattttttctaatagatggtctcaaatagcattacatttacctgggaggactgataatgagatcaagaacttttggcactcatatctgaagaagaaggttgctaagacagaaaaaattaaacccatctcagaaacccagttcactgaagaacttgaatcaccaatgaaatcaaatacgacgatttcgagtctcgattcatttggaaaggcagaaggatatcccatggatgttactcaattagctagcaacaataaaagtttcctaccaaaactcttctttgctgattggtttagcttggatagtattaataatgagcaaattaacttccaagattatcatcaatatcctaattacaacagtagtattaaggatattgatcatcttatcaattataatatgaatcttgaagaagatcttcctcaaggagttacatacaatgaaggatcatgtagcaatgatgagttacgtaatgaagcacaacatgcgatatttgattcacagttcaagattgaagatcagactttagagacaacgcaacttagcgatttattaatatatgggaacgaaacttcaaataattgtttcatagaaagcaatttaatgtatttataagggactttagattatactacatttaaaatcaaaagcaactctttgaaaaattattgcataattagtgttatttctctgggtatgaggtggactaatacaataagaaataagaatgaggcagtacatatttattcgttttgaatcagacctttcctctccttacaacaagtcagggtcgacttttatcatgttcaacatgtttcatggcacatggcctcttatatactcttttcataatatgattgtatgaagtgaagaatcatgaatggatgagctatacattattgaattcttcaaatatgaattcgcacagggcccctatatagttcgagacggtcctgcaacgagtctaattacttactaacctaaaaacatagatttcttgacatactgttggtaaatgataagaagatccaccagatagaagtaaagacatactcaaattcaacgaagagctaaaatgacacacatagcagctaaaatatgtgtaacacagcatacccatcgtctaccagaacttactttgtctcaactcccgtttagagcatatttatacttcctccgtttcaaaatactcgctacactttctacggtgggaagtttcatattacttgctacacttcctttttgggcaataaactctttttatctctctcttcccacatggatcccttttctttttactctctacctctctcttctccaaaaattgtctaagattccgtgaattgagaagtgtagcgagtaatataaaacggaggaagtatatgatttagtttgttgcaagatattgtttaagttttcaaaaaacgctagctctaagctttccatgctcatgcaattgtgacattttaatattttaccagtgaactaaaaaaacagaaacgaaacaatttggaaatcaaatgattaactaagcaattaacagcttttagagactaaaaacagtataataatatctgctaatcagaaaatcagcagtaaaaaaaatcttgtgggtcgttctatttatgctctgtgtttttggattgagagaatctgaacttaattaaactgagaaaaactgaagtgcaaaaaggaattgaattgaaaataagtccaaaaaatggaccttaattttacttttttttgggtttttccacatagtatttctgtgtttttcgaaattctaaattatacccgacgtttttgaatttttcacgttgtacccctaagattccttaacgttacacacaatacgcttatgcacctgggattttcttatcctagttggattttttagccttgttagttgactgaggtttgagatatgatctaataaattgaagactaagtgagattttggagtaggattttctattagtaagggtattttgttgatgtttagaaaatttacgaatataatatggagaattaaaaaaactggatatgacaaataatttcgaaaaacacataagcaccacgtagaaaaaaaaaatagtcaaactttttgttgactactagtttctcctcaaagcatacggaagcagcccatcaacagtgacagaacattcaagttgccatgttggcaacctagcctgtgtcagaactcagaatatatccaccagaaaaaaaaaaaaaagaaccttcctctttccagctaggtttaagtttataacgattttaattgttttttgcaaaagttgattctcgattggttaagcatttggaacgactttacctgcccaatcaacaaaatctaatataatactccaagtctctaactaactgtgttagattccttattttcttatcaatgtcatttgaattattaatcagaaatccaaaaaactttgtcctgttcttatatttttatgatcaatttcgtttttatgtatagtttaacatgtttgaccttttggactaatagatgttcaagttacagtttttgatccttttgaatatcaataaccttttatgcatgtccaatttcatacatctaatataaacttgcatctttgtttgtgttgcgccaaatttattacttgcattttttgaaaattagattcatagactagagaatttggttaagaataatttagtcacaaaattcaagttccaaactttaaaataacttgagcacacatcatgaatatatgatactcctatacagtatacatgatagatagcgcataaatgtttatatattgctccttttgtatatagaatgatgtctggctcatctcctccccgttagacaagaatttttaaggttaatcgcgctgaaatgtttgagattggatgattttgctcatctccaagatggagttattccaacaccttgaaacaccatagtactagtggattaagaataaatcccactattagacatgtaataatatccactatataacatatctccagcagaaaaacttcctaatgcactttgatcctggaacctaaatggtgaatccagcattcccttctgcaaatcatctccaccatcctcacaaaacttgtcgctgctcgacgacgagccaacttcattgtaatacccaaaaccattgagaaattcatcctgtttctctgttgtgcaaccaaaaccatttttttcagaagttagctgataactaattagcccattttgccctacattgttactaattggaagccaatcagcaaaagcaagtttgggtagaaaactttcatggctttgtacttgttctccactttctaaagatgtacttctttgattcaccagaaaatcattttcttctgtgtttgagatatcagcaaatttaggttctgtataagtagcttcagcatctctagaaatacttgctcttttcttcaagtaagagtgccagtagttctttatctcattgtcggttcttcctggcaagtgttttgctatttgagaccatctgctcaattgcatagaattggttaactttattgtatatcaattcatcccctatttgagaataccataattatagagatggaaaataggtcgtatggattagcttcgatcagtctccaagacatacctttgacctacggtatcttctatctgatcttattagtaaaaaaatataaaaagttgatattacgaatttacacattgagacaaatctaacaacatccctcgtgaatatgttttttggtatacattagtaagaagatttggtcaaaggttttaaaatttgactctcaaaatagaaatggaaactatattttggaaagggaagaggagggagacaccgaaaatggtaaatccttttatactcttgagtaataaaataaaaattcaccatcttttaccattataccctctattaccaaaatatttacatcattcttgatttattgggtttcaaaaaataaaagaaaaatatacaatgaactttatgaatttttcgtatacattattacgcaattgatctgttgtttattttcgcacgcatcgcgtgcatagaagactagtattatttacgtcaacagtcaacacaataacacaactaacaacttctaaagtatgtacagccttttccttaacatattctattagcattattcctagattagatgtggaacatccaatgatatcacctatatagtattttacttctaccaatagatttcaagacctttgttttttcattttgtcctttttgttcaagatgacttgcaaattgaatttggctatttaatttgactaaatcttaaatatctcatagtcaactatgtaaccagagccccaaaaaaaaaaaaaaaaaaaactatgtaaccagagtgcatgagattagcgaaaaataaaatataacacgataaaagttacatatgaacactttggaaaatctaatataacaccaactttaaacacaagtactataataatgtctttttcagatatttccgtaagatggggacatattcgaggagccaatgaaagattaattcctaatcaactgaattctttttaatcactcttacagacctatcagacgttgaataagattaaaagaaatgtaattaagtatcactgcagaataataatacatcataacattagtctaattacaaatgattaagcatctttttaattcaaaggtgaaaatgagaggagttaagaaacttacttgttccctaaggtttggtgaagagtcagaatcatttcttcttcttgtgtgctaaacatgcctcgtttcaatcccggtctcaagtaattaatccatcttaatctgcagctctttccattcctctgcaaccctgaacaagaacaagttattagtatatgtatagctgcctcacatggctacaataaaattgacatgaataatctcaattttcacaaggcttctcaaaataatcctaactttgaattattttggaataataccaactttaggaggtaccttctcaaaataatccgaactattaattttttgtgtattatagacctaagatagattagtataggtaagaaaattgataatttagcttattttgagatggtccctcaaaaattgaaattattctgaaataacctaaagtttgaattatatcgaaaagacaggtaaaagttgggatattcatatcaattttttctttattatttaatttgctttaatagttgttgaaagagaaatagagaatattgtccatcatgtcatgttaatgttagtatgttacgtaattcgcagtaaaaaaaaaaaaaagggtatgcggaccaacgaacgcaattacatatgtatgttacatgtactgtttcatgacgaataacttaagtactctgcttaactcatactccatactacacaaatggttctaaactacgttactggactcttcttatcatcccgaggtatcaattgtaaaaaacactgacatatgtgtggatactaatgttatggaccaaagaaacggacgtgtttgacactattatctcatacttgtgtatcttaacataagtacgtatttttgtaacataaatactaaacacaaccatgcatatatatactctgttatttggacttttcatttcaccttaaatacttgtgtcggatttttagacttccacataggtataaatactttgtcataaacgagtttgacaattgaaaaatatactggtgtgggacaaaagtactcgaatccaagtaacacatctcgtgtgtttattattagaacaatgatatctaagataagacaatacaagttaattatataagtaactcagatgaatgcaaaaaagaaagaacaactaacatgaatgaatatggttagttttagttagcatttctatcaaactattaacttaccagcgttgagaggcacagaactccagcaactaatgccatactgaagaatatagtctttgagcctttgatcttcttcaggtgaccataacccttttttgtgcttttttgttggtttttctgaagatttcaaccccatttttgcaaattagtaagaaaaacaagcttagggtcaataatgaaataaaagtgtaggacaagcagcccttttgcttggaatatgaagcaaagatgacttaaaatacagccgcccaaattttctctattttaaaagggaaaaatagataatgagattattgtatcttaattgtcatttagcacaaagataatcatgattttgcttttttaaaaatttcatttaaatgagtaaacaacaaaacaaatgctacttgtccctagtttgttaaaagccattgttataatcacttttgtgaatgtctatatttttataggggagtaggggacttttgcctttagagtaatttctaattggtccttggaccacaaaaacttagtctttgcttaggattccttatacaatagtagtataataagtcatttagtaaaaagagaaaaaggaatacaaaatttagctgtagaaatcaattaaaaacttgtttttcttagtttagattcactaattagcaacttaattattggagaatcataacagtgatggttttcaagatgatgtcagcacaaccgtaattactaggattaaaaaatatgactctttactaaagtttgtttgattagagactgtacattattggcttactgtctattactcgaatccacgcactcttattagacacgaatactactagttcaagtatcaaattcgactattttgatatagatttctatatatgatccatattgatgtatgaattgtctaagtattgagtaactgatacatatattgaagccaataaaaagtgtgtaacataggccatagccacatatgacataggtgttagcttaggataaaaaaaaaaaaactctagttggctgaatttttagttggtcaaacaaatatacgatagttatggaatcaactcatcaagatagagtgacgttacaaagtgcctccactaaattcatgggataaaaatttagccaaatattcatactatcagacagattgatcataagtgcaataagagcagtacttgttatttataaatcaacgtgtgttagttgtgtatatgtgtgttaaattttactttttgtccaaaaaaaatcaatgataactgaaaaatagtaaaaattgcatcaattagcgttatctttttcccccaaaaaatgcaattgaatatttataagaatccttttttgtgttgtttaagaaccaattatctataaatcatcttatttatgtaattaagatacttatcatttataaatcaatacatatttttattttttgaggggaataaatcaatacctatttgtatatttgttaatttgatgaaattacaccattatccctggtcactcaagctgagaactagctagctaatagtgtgttatcctccctggtgaagtcgtgataataaggaaggaaacagaacagctaagctacccggtatctgacatgggttactgtcatacttaggtagtcaaattctgctagggaagttttctttgtagataaatagattatatttaatcttatttttgaagttgataaaaatttagaacagtgggttctatttttatcagtgaaattacgtcattaatgaagttggatcaatactataacctttaccctgttgcgcaattaatttatatacttttttttttttgaggggaaaagagatgtgcattaatcaagggacaaaacgtccatcaatacataaggagccacttccctgggacaatggttctcccaacactgctccacaccaaacggcacaactctagcaaggttatgggcaacagaattcccatcccttttaacatgattgaaactaatacgatgaaaaaacgtactcaaagcaaaaacatcacccaaaatagaatctaaatcagaaaaaaaacaaagctgccttagagagtcttgagataaccaccagagcatcagattctaccaccacattgtcgaggccatgatctttggcaagccggatcgcaaataaaatagccttgcactccgctatatccggaggccagtaggctcgttgacgtctaactcccgcaaacaatacttggccccttgagtttcgggccaccgctgcaacacttacccagccattatcatctacatgcgcatctgcattgagtttaatgatcccctccaatggcgcacaccactgacctgcactagtgggccgtacagcagcaggttatccatagatccgacgagaatagtcattgtgctcctcaacttgtcgacacacccgctgagatactatcgcgagaggttgacaaatattctcaaacacaaagcgattacgctcagcccatatattccacgccagaaaacaccccttctggacaatcttcttatcaagctcctgccatctcaccagcattgcacacccattctcatctcctccattacttaccatggctttgcatccatgacgcatccacatttggcgaactcgcgcacagtcaaacaaagcatggtgctgcatttcaggttcggtcggacaccatgggcatcctccatccgcaattaaatgccggctcctaagagtctcacgtgtaggcagtgaattagtacaataccgccaccagaaatgacgaactttaggcgatacatccagcccccataacaccctccaagcttggtgaaaatcctccaaattcccccctttccctatcatgtacgccgttttaacagtataaatgccatcctttgaatatgcccacgttagctcatcattcatctctcgtgaactcaacggaattgacagaatacatttttgatcacgctctccaaagttttgctcgatacaatcaattttccattccttcgtagcgccatcaattaaatcatgcacagtgttcagctcgtcaactctatgacttagaataaaccgccctctctcatctcccacccaagggtcgctccaaatatttatgtcacgcccacttcccactctccaaatcaacccctcctgcactaagctttttgcactccaaatactccgccatgaaaaactatttgagaatccaagtctcgcgttcaacacatcgccatccggataatatttagcactcaacaccctactcaatagcgaatttttacaatgcagtaacctccacacctgacgacctaatagagcatcattaaacaccgaaagatctttgaatcccataccacccaggcatttaggtttgcacattttctcccaactaacccaatgcattttcctttccataccctttcctccccaccagaatcgagccatagtagagtggatttcttggataactaccgcaggaaccttataaacccccatcagataagtaggaagagactgaatcacagccttgatcaaaacttccttcccagccctcgacaataatttttctttccagcctcgtaatttcttccacattctatcaagtaaatcccgaaatatcagctttttcgatcttccaccaaatgtcggaatccccaaatacttattatgccgatccacttgcctcatttgaagaattctactcaaactttctctctgcacacagcttactcctttactaaaagacacctccgacttttcatagttaattttctgtccggatgccgcttcatatttgttgagaatatcaactattttcaggcattcctgtcgagttgctctagtaaacaaaaggctgtcatctgcaaacaaaaggtgagagatttccggacccgacctgctggcttttgcaccatgaagttcctttgaaattacattctgttgtatcatctgtgagaatgcatctgctaccaatataaaaagaaacggggagaaaggatccccttgcctcagacccctagagggagtcaccgaaccacaaactctgccattaatgagaaaagaataagacactgaagaaatacaactcattaccagattcacccatcgaccatcaaatcccattgtcagcaaaattttcctgagaaaaccccattctacccgatcatatgccttactcatatccaacttcatcgcaatgagccccttcctgctattattcctttttttcattgaatgaaaaatctccagagctatcagggaattgtcagttatcaatctcccaggaacaaaagcactttggttctccgttacaatatcaggaaggaattgtttcaatctgagcaccagcgttttggaggcaattttatatagcacattacataaactaatgggtcgatattcagatacaagagtcgaatctttgactttgggaatgagagcaatattaatttatatacttgatcaagataaagatggcagtcaataacaaccttttgtttcttgaagtggttatatattcaaaagacaccacatgttggactactagtctactaaagagtacagattactgtattttttggttcatacataaatacatgtctctatactcgtatatctgtcgacgcacttttatgctaggttgtacagagacggatactgatacaggtttcgattcgggtataagaatgtaaaataacaaattttaaaattttaggaataggcagacgtacccatataggcatacaggatatgtatcgtatcgggtacgtgacatagcagaagtgctcgtttgaggtaactatttttaggaattcttgtggggatttaagtactataagcggaatttcatgaagtcatattcataagcacttaaaacaagatcacatacatatacaatcaaggatcacataatagtttagaattagcctttgaagcttgatttacacgaaatttgttacaatccggagatagaaccgcaaatgtgattcatctacttggtccaccattccggatcaacgttccagcaatgctagttggaaggaagaatatttttcttctatttcttggagttaaccgtgacttttcaaagaataagagagagaagaatattgaaagagatcttgtatcttatccttgtgattggttgtacaagtatatttagctaggttagaaatctccttccctctcccctcttggccggccaccctagagcccttttggactctaggtttttcttttattgatccaaataattatgtgtgacctaatatgatccatttaattgggctctggatttataatttactaacacggagctctatagcattctctagcaagacgtatagacgatacaatttaataaatttattatctccataatacgatccatattatatttagtaattgcattaaagtcgaggacataattccttttaatttcatcttatatattccagtgttttaataccccatagttgcatctcttcagaaaagaacctcatacttaaaagtaaaaacctcatgaagattttccttatcaaccctgcaccgtatttttttcttggatcatatataagtctctgcaagtacaagactaggtcagtaggtcaccatctggaaagaatatagatacaaaaatgttattaagattggaatcctaaaattagtaaaatagttataattatgctacaacttagtaaaaactaatattaagaatttctgcacattaatattaacttgtttcattctcaaaatggtgatagtagtttaatctctattatataagtgaaaggggagagaaagataatgccccccttaaaaaagtccgatatactcttaatgcatttgaattgctatatactacgtctatatttttttaattgcatcatttaattttgtgccactatttatcaactaagtttgttaaactatctcacattattatataagaaacaacatagtcaagtggagtcttgttagattcatctcaatgcgaaaattccaaatatcaaattttaataatttttacttatacccaatataagagatattaacattcatattaacattcaaataatcgcctcggcaaatgtgaaaaagcaaatgttgcgactaaaaaatacagaatatcttttttcttcctacttgccatatatattgaacaagttaacaatgaaatgtaatttgaaattcaattagatattaaattgaggagaatgattttctcttcttacatgtgtgaaaaactctaataaaaaaaaattgaaaatataacttaattgacacaatcaaaagaaaaaaaaaacttgaattttatatcataagtatacatataatattatttaaagcctaaatattgattaacttattataaaatagagattcaacgattgaacctgatatacaaattcttccactttatttgagacaagctttcttctgctttacatatccttctctcaatactacatttgaataatgatgaaaaaataactaaaaaaactaacaaaacattaacttaagaaaagcatattaaagaaattaataaaaattagtaatgtctattcgaatcattttttgtaacactgatgaataattaattgagaaaaaaacgtgaatatgacacgcacgcataacgtgcaaaaaatgttagttctctaagattgaagttacatgcaagttgcaaccaatatctaataggagaaatcatagaattgtagcatcgtaaaatcatattaagatcctaccatgtgaatttttataattgggtaggatcgaaagatcttacaaaattaagatcctgtacaggatcgaacatataaggtccttatggatcgtaagaatcataggatagtatgatctggatcgaaattttaatgaccatgagacatttgggtcgggttagaagtacgcctataatacaaaattaattaaatatagtaagcagtaacttttttttgggcccctttgggaacccattgataagatgaaggaccatgctttaggctagtgtcaacgtgattaaaaatgactgttactatatataatcaattcaataaaagatcttgtaagcatttcatcatgcttgataattttatcaaaaatcttaaaaaaggaaacgaatagacttacgcatagataagtcatacattatatcccaaagacttttcaagtccaaatttttcttgtcgtctttgcaaagctaatacctctaatcatacaatattaaagaaaaacattactacaaatgaactacaaaataatgcaactttaaaataaagataatacatatatgcctaatgccttcacataggaaggaatatattcatgccatttctacattcttgatgagtaattcatttgtaaagcagatttataaagatacaaggtatgtaaatatcttagttgtttatgtgccttgctaaagtaataatattattataagtacaaaaagaaatttgatagggaaaggaaaaggatgttgaaatatctgatgtgatagtttacgtttgtcaaacaatttttagctatcgttgtataattttacttgcatgactggatacttagttataattggattacactcaaaaatcaaaattagttggcataatgtttggttgtgacacactaacgtaagagagaagaaacaatgaatgtactgtttttttatttatttactaatttactattattattgaagtatgaggaaaaacagttgggtaaacatcaccatattagtattattaattaagggagtattatatatctagttgaacaaaaaaaatttaatgtacagaaagaataaattctaagccctttcattatacttgatccaaaccccaccttggccccataccaaaaacaaatatggcaagtttcaccaactaaaaatatagcaagttttacaaattactcaactttcataaccaaaaacaaaaaaagcaatcaagtttcaaaaattctctacaaagaaattctaggaaataccaaaataagatatttcattttacccacatataaaatcaacgtgattaaactcaaaacccctagaatgagaaaatatgaagtaaataaaagcaacccacaaaataacttatggtacaaaacacatatcatacagacatacaccacacatgcccgtttatgagattttggagcctaagggcaaacttacatattaaggccctaattaggtccaagttttttgaatatttgatttttggtccagaccaaaaaaaatatttggtccgcattttttaaaattttgatttttattccaaatcacgaataagtttctttttcggcttttacataatttttatagaaaaattaattttacaatatttttatgtatttttttatgtatattatatcaaaaaatgcctattctagcaaaaccgcacatcagagccattgttaaccattggtcgttaaggcgtattcttaaaatccctatatctaccgctgtggcaattgtagcaaagagcacatgaaaaaatggtaaagcaaatgatttatatattgattatttttccctcgtcttctattaaaatcatcaagtcttgcttgtgcttagttacaaaacaaaaatgtcatattttggacaaaacgctatctagtattttatggtgatcaagccaaaacaagccaacgaggtactaaacatcacaattattctctttgctgagagcctgagagaaatgccaaatttttatgggcccataattattgtgaaaattttttaacaggaaatcatcagtattgttaagtgagaaaacttccggttctctctctagttttctagagagactttgttccctttaggtttttccttgggagagtttcttcctagcctccacagttagggttttcacttttttaaagctttctccttccttctttcttcttcctacatccttttcttgggggctaccactggtgtcttaaccagtggtaagccccgaaaaatcctatatatttgctttcaataaaagttctcatctattagatggtgattttttttagtatgttgattgtgttggtttttgaagaattagggtttcacaacttctgtaaaattatggaagactattggagtacgttcatcccaaaatttctgcatctgcagatcgtatgccgaaccagagcgaactcatagattgcattgcttcagatgaagatttttattaaggcaaaattaagtcaaacctgcgatgcttatatttctagggtaaagattttcaatgcaaatctattaaaaggtgtgcataaataacagtttaaattgcatagtatagggtttgatctcaagacgtcaagtacatatacaaaagttttaaccactaggctaaattttatttagtgttattatcataaagtattatattaataaatgaaattttttcttacccagaacatagcccgggcctaataactagttaacatttaaaagtagccaaaagaacaagaacaaaaaaaattggttaatcatgcttttatttaggaaagggaaaaaactattacgaacactttctaacataattccttaatctacgtgcaaattgcacacaaaaaaaaacgaattgttgtttattttaggctattttttgcctattttaggtgaactgcgaattatatagcaatttatgttacactgctctaatttaagtctcatccattcaactgttacttaactcaaatcaacaactaatctatacgaatatattaaaagacttgcgcgacaatgtatacacgccaagtgtcacctctattactcccttagaattgttcaatgtgtatataagtcatgtcaattaacaaaagtaaaattcgcttgcaaccagatttaaacccatgacctcttgctattatacataacacaattaccatctcaaccaacttttaattatgctttaagtgtccacattattatatttgtactttttaaatgttgattttccttaatatatattagtgggaaaggaaaaaaaaaatcatatcaagtttgaataataataccaactcgggacaacacgtgatcccattatactagttatcatgttaaaccctgacataaatcattgtaaaactaaggtagtagtatcagatgaaccaaatttgagagaagaaatgttttgtatcctaattggcatctcaacttcgctcacaaaaaaaatgtagctgattccttcaccaaaaatatgttcacttacaaccaattacattacatgctacatcgaagaatactactatattattattttttttgataatgaagaatactactatagtagtagtggttatacaagacttattcacacaagtcataaattaagattctctgatcttatattaatatatgcttcctaacagaatacacatatcaatatttcattatatcaagtacataaattggtttattttccatatatttacagcatttctcccttacagatgtacagaaaggataatcattatcttgatgatctcaactactacaaataaaaacatgattaagactgataaagacatctaaaataattaagttaatactcatgataatctagacttagttgtttactttattacttattcagctgtgccaagtgtacggatctgacttgattcttggatcacgtaacacagttcattggttacaacgattgacttgaggaatagtggcaactaacactataagtttatatcaacatattatgtatgccattttaatgagatgatgcatcatttactactaactcttctgataaaaaatgtgatacagttcaaatgtcaactaaatgagatagtataactgcataagcaagaactcaatggaacttggacagctttgtttccccctaaagaatacagtagtatattcaacgttgacaccaaaagaataacaaaaaagaaatcttagtaaatcaactctgtgtttttaccttataaaataagtttaacaaagagtaaatgttaaaatggttgttggttattgagtaactgttagcttgttgaatgttaagtgtcaaagattagttgtctaaataacttctgaaagaatatgtgtaaaactggatattgagttagtaagtaaaacaagacatgagctattactccaaaagctgtctatattcagaaagctatttttttttacttttcttaattactaccttaatcactaaaagctaccttgaaatattaatttgccaaataccaatttatatcttagtaatatttgtgacctgttccggtatgaaataagtggtattagggtgtgaatcggtatgtcctccgtaggtaagccggtttagtttcctgcaaaagagaacacgtaagctaaccccgggggttgatccgaggaacacccctccgatgcctaagtcagtaatgggtaaaccggtagctctcaagtagagtatgattgtgtttgtgaacgtaccttatgactcagatcaacggggtatttataggagccggtaagagtcattgttcaagtaggactctgctcctattggttggacgtaggtatattcctttgggatatactttcatcttctattgatgtttatctttaggcccgtaggcgcatttagatatagaaactggatcaagcctaggcccatagataatggcccaaggagggataccgtcttggtatcttaatgaaaccggtatgacgaagtcaacggttctgtagtaagtgtattgaccatgacgatacatatcggtctaggtggaccggtatggaacttagtcagcccccatacagaaccactaaacactaatttgctagataccaatttttaccttagtagtatttgttgacttagtcgaaccactaaaagctattcaaaaagttgttgtcgaacgtaccaaagaattgaatttagaaattttattttaaatcagctgaagtaggtaaattataggtaacaaaatgaagagtcacacttcatgattataattaattcattaaagataatttctttgtaaaagtaaaattcttgagctaacttgatttgtattctctataaaaatatagtctggtgcgtgtatttgtatactaaacataattagcagaacaaatagtaaagttttttcctttgtctctagaaaaattcatacagtacttctcattattggatgtcccaacaagtttcatatttctagattcaagtaaaaatttcctctttttattcccacactttctttatttcccccttgctctatctgatagtcttatccggaaaaaacttggttaacccaccggatagactacccaccccataatataaggttatggtaattatgatagtggaatccaactagacttaaatactaatattttaattatctattagtagcgggtagtctacccggtgggtagatgtagcaatgtccgtcttatcctctatatatataggcacaaagggtttatgaaataatagacctaatctgaatagaaaatcatgaaaatagaataattctcaagcggcttctttcatcacaattcacaaggatgcaagtcaagggtttgtgagttatcaattatcatggaacttcaatttgcccaaataaaaaactttggaattgttgttgtttagttgagtgaggccatctgtgccttgcatgccaaagaataatgaggatgtgaaaaactcgtgatattacacatttcaatggttgtagtttgcgcaaacataggaagttttactctccttaagattgcaattcaaataaggaaaaattcacatagataatccgaactatggctagtgtttcaatattaatcccaattatggattattctagtataatcctaactattgaaggaccttcctaaattgaaccttgatgacctacaacctgttaaacaggttaaattttaagattttcgtatttttcttttttatttctttctctcatcctttctgttctactgaccatcactttcatccattgaaacaccaccggtacacccacccaccctataaaacaccaacaagacacccacccaccctataaaacaccaccaccaatctgaaatcatcctattcttcccgaaaaccaccaccatcaacctcaaaaccaaccccaccacctcgaaaaacactttcgttcacctgaaaactacccccgacccctagtcacatgccccctcacaaccatttattccccttcctaacccatacactaactccactatagtatcacgccaacaaactccgccaccaccaccaccaaaccggcactcctccccactctctctcctccctcacgtcaccaccacagacctcctctcttcttcttctttttgtttctgaatgggtttgaatgggttttggggttggggttcgaatgggttttcgggggtggtcagggttgcgatgatgtggttgtggggtttgaatgggttcgacggtgggcgagattggggttcgaatgggttcgacaaaggtgaggtgggggtgcgatttgacgggatggggtggcggtttgtgggttcgatgggggtgggggtggtttgaaggtggtggtgctgcgatttgaaggtggaggtggtgtgatttgaatgggtgggttgtttggggttgatttgggtcgattagaggtggtggttctgttatgggttcgatgggggtggggttgatttgtaggagtgcggcggtaagtggtagttctgatggtggctagggggttcgaagggtgtggcggtctttggtggtatcggtgtgtggtctttggtggtggtgcggtggtggtctttgtctttggtggtgttggtgcgtggggttggtgtgtgatctttggttcggtggtggtctttggtgcgtggtgcagtggttattatctttcaaaaaaattataggaaccaatgtatgcaagacacatgccttaagtaacttgcttaacctaggtttcttgattctgactcattaggagaagataccccatatagttaagattatactagaataatccataattgggattaatatgggaagattgccaatagttcggattattcatgtgaatttttccttcaaataataattcccaaaaatatgtgatgtttggttgactaccagaactccagaagtaccacttctactgttctacaagaagttccacttacttcggaaaaactaagctactttcttaagttgcacttattgtattatcaaacaacacgagttacatacaaattacttacaaactccgctattttttgtcaaacaaacaaccactcaaaaaagctactattgtagctagtgcattggaaactctgataatttcccccgctctctcctaaaacccagttactattcattacaacccatatgattgggaataaaattgaagttcaagaccacaaaaaaaatctacttgcctaactaaaacgggtagaaactaggactgtcttgtatagccttaatagcgaaagggtagttagatcaagggcactagtcactactgacatagtgacatttaccttggttgtcttaagggttacgcaattagccagacccacaacaaaaacgtagacgatataactatagctattagctacaacatgttgcttataattgcatggtgtttctctcaagagtataatacaacaaaagaacataagtagcaacaccaaatatgtctctaatctatgatttcaatccaatagtaggggttgttataagtcattagactaatggtcaacagatgaatcttcataatccaaaaatgtctcaataatttcttcttgtgttaaatcagtgaagtaaccctttccagcaaccataccttcttcccgtgcaaggcgctcaacttcaacctgaactttatctcctccaaccttgctcggatccagcaaattgcaagcgacctcaatggtcccatcaccatgagcaagcgccatagcttgcactgatggaagcccacctcctctttcaccaatgactttagcaattctacgtacagctgaaatattagttgagaagattgggacgttgtagttgtccacccatcttgtactccctattactataacacccttagacggatcaacttgacttggcccttcatcggggccaattggtaaattctctgaattcgggcccccagcccatacatttccttgagtattgggcataaagtagccaagctctcttcttattgaatcaagagtccgtcctttctcatgtgctgctccatatagaaagataggaactgcatatttaacatactaaaagcataagaaaggcacaagattctccagaaaacctttaaataaaaaaccaaacaagagtccacttgtttctcactttcttgtgagatagcagcaattagctgtgcgttcaatctagtagctaaaaaagttgattctctttgcgattgtagcttcggcctgcatatgcaaacccataccttgccacagaaggtggccttatgccaattaggtcaattattttcaggtagtgtcagcaacacatataacagtaacacaagagtccagtcataagaataattcacaatgttactatccccaaaccatgaaggataagttatatctaaagagtagttagatacaagaagcttaagaatcatcactcacagctgtagcaaagagtctcgaaaaggaaagcccgtcttttagaaaaaaatacaagaaacatgataaaaaaaaaatcatgctctagaaagatttgattagtttcagatgaagttgctttaaacaatagtgctcccttggcgtttgccccctaaccagcctctatgtattaatctgaaatatcgtaattacccctttgcaatgcctcttggctcttgcaatgcgtacaactagcaaattataaaaacaacttacgggaacaagggcttcagcatacaacttacaaggtatggaaacaaattcaaacaacttatctggaatgtaccttataatccaatattccagggggacaaaaaaacataactgaaaactagtgaagcccaccatgtaaacactcaaagttgcttatttcatccacaagatcatcatgcaagcattaagactaacatgaaagcagcatcaacacccatgcaggatcacattttaaggaagttgacaatcacagcaccagaaactcaaacaagtccattttctattcaagcaatgaaatgagttcccacacttactcctaggtctaacgtgctatgtaaagtatacaaaccttcaagcttggtgccaatatctctggccaaggaccttgcaatattggccgtttgctccaaagtagcattggccaatgggtgaaggcatatgtgatcaacaactccaagacgaggatggcttccactatgcacattaaagtcaattgctttgtaagcagattcaaccattgcaaatggagcatcttttagagggaaaaaacctgaaggcaacttgggaggtagcttagagacaagagtataaccaactctattataagtttcatcttcaaacttattgataagtttagcttcatggaaaagcttggcagctctttcgatagactcaagggcagctttgttgcggctttctgatatgtataacttgcaacaagcaagcgtcatttttagcattctatattttcccactaatcttcccgatctacaggaaagataaatgccaaaattagctttgcaactgccatatatagatcgcgctcacacaagctaataacgaccacaaactctggatatctaatagctttatcagcaatcagcagatgtcatatcaggcaggctccatctcggatatagtgaaatacacattattacatcaataattatgttaaaattaagggatctgctgtataatgaacccttaacttggtacataatccaaaagccaaagaatactaaattaatatttttaattacccactagaggtttagtatcaaatctatggtaagaacaatttaagcaaataagacatctatatacggaatcccccgtgttactatagttgcaacgctcatcaaaactcatcccagcaaaagctataagatattcacctcataaactaaagaacttaagtacttgaaaaggttcaaacttctcaaaacaaatactgatggagaatgtaaaatcatcaaagacaatctccatacatcgtagttcttctgtatatatccatttacttacaaaatctaaacctttctctgtaggcattaagccacacaaattatactgctccatgtgcttctaagtaagggttatttatagaaactttattttctttcaagctaagcattgttctacaattcaatacaaatgtaaagttcctattgtttatataaaaaaagtccactgatcccaccttactgaaccctcaagatcacatagtctcagccccagcagtacgagagggtatccacaaccacaaggctatacttataagaaagaaagaaaaattaaaagaaaacctaagcatcataatgcaacttcagtgacctactatgccttcctttagcctgaaagttaataatcatgagcatcagacattttagggtaccccttgtattccaatttaactcctaaagtagcacaaatagccttaaacttcaacctaagctcttttaaaatgtcatctttgctctcatcttcatgatccataaatggatacttctcaagcaactcttgaatttgatgtatactcttttggatccgtgcagagaagaaactgggttcaattcgaaccactgaggtccaaacatcaatgagaccacggtaaaacccaagctcttcaccagactcaaacccatgttttaaacccacttcagagccctcttgcttgcccaaggcaagcccatctttatagccatctttgtaaccttcgttaatgtggcattcttccaagtttacagaagaactgaaaatatcttcatcaatagtgttgttgttgctcgaaatttgggtctctggtggtccgatttgttgaggatcaagacaggtttcaaatatatccattggatttgagagggaataataatgaaggagagacagggggtacctgtttgttctagaggtacaaggaaatgtaggtcgaatattgtgtaagagaagcagacgaacgtatttcttgagaaggaggatcagaataacaaaacctgtgcaacaaagagaataatataatcatcaagcaagggaattgtgacaatagtaaatgcaattaccaatagttcatgatcctttgtagcttaagtttgttatagacatgctgaattttgtgcaaaatattagctatggattccatatttccatgtatccatagctaaatttagcaagtgatgatatgcttcagtagctaattttagcatcatcggtataaagattgtggattatcatgcttcaaaaatatcagttactttttttgtgtattactcatcttgtgtacacataacagatattgtgcaccgttcacaagtcatagtcttttgtgtttctagcaggtaagcatgttaaagttaccgttctatgtatttgagtgactctctcaaaaggggtaactcaaagcactagagcacagtggctttaacaatggaaggggcaacttccgaaaaagttaacctcgcgcaaattaacaattataatgcaccaggcacacatgagattctgtctattgtgtaacactattgaggctaaatctactaatagtatcttttgatcacatcaaatctgtatcaataatcaatatgaaataactagctgtaaaagacctcctgcacactcatggtgatatagatgaaaccgaaagataaaaattcatacatgtagtcaatggcggatgggaaatttcggcaggggaatagcgtaaatttattatactattacaacctcaaagtactttactaaaagaattacaattgttcacaacaagttctcattttttcgaaccaatttacaattttgcttcaacttttacctccaaaaacaaatctttagcaagatatgtaactaaactatcattcaacaactcatctcttgattttcaacttgggttgagttgtaaaaaattatgaatttgaatcaacttaatttccatcacattttccgtttgaaaaaaaaaaagaagcttgatacatataaattactctcttgttttctcttcattgttctaaaatacatttatacacatagtacaagaatttactaatcaattcaactggtactttcttactcctatgaacattgtcaatctctaatcggacactagaacactgaaaaaaaccttaacaattcacctcacacaatcacaattcacaaagtcatcagctattcgcacaaaattaatatccttgttcaaaatccataaactaacgttgtaattattgaggtgggtaattaattttagccataataatctgaaactaaaaacaaaattggactagaaaagtagaaaacaatacaaaaattcagtctattaaaccagaaaatacctctatgagatgaaagaaagactaaccaagatattaaatagacacaacagtggtgcgataacagtcggaaaagcagtcggtgaacagagagacagaggagagagaacggtgaaccaagggtcagggttcaatattaagattaatcttcttcttttttttttttttttttaataaaattatcctacttttctctctttatatatgttgagagatttgcggaaatgttggagttgtgtagaggtgggcattggccgggccgggccgggccgcactatttgggcccgatcaggcccgagctcggtccgttttccgctacatgggccgcgggcctgtcacggttaagaaattatatttccggcccgcaccggcatgagcccgcgtgggatagcacgcgggtcgaacgctcctttcctttgtcttttagcctaaaactgtaaaaaaatacaaaaataaaacatgggccagccccgcaggaagcacgagctcggtccgtgggcctgggccgagccgtggacaaatttttaaaatttcaaacctggcccaccatttacccatgcccggcccatgcccacctctaattactcgtagaacctactgcacaacgtggttggattctctagaattctaacataagtctacaagttaaaatttgaccaatgttgattattggataaaaattaatggctcatatattctctttccaatattttcctccctcctaatactaagaagccttgattttaaaatgtatggttcggatacaactctaccttgtagagtgttattaaaacactagaggatccggactcaaccccaactcacttgccactcggacacaacgagcaaattagagtttgagtaaactttcactagttattagactcgggttatgcctcgggtaagaaaaacattcatttattaatattgtactttaaaatgataacattaaatacaacttggtctaatagttaaaactttaatatatgaatttgaagtcattggatcaaaatccacactatgcaatttctaattttttttttattgtacataaattaaaactccctaagtagagcgctatgtgacacaaatctttgtttaggaactcctttagtatttgcataaaaggagatgatgtgcaacaaaataattgttagacgatcatcgaaaaattaaaagttaataatttctaaaaagattaaagcttaataacctttaaaattgctcgttgacaaagttgaatttaaggaattttaattgtcactctccttgtttacttattcaattggcaaaggtaatttgatcatagaaatccaaagaagtatgataattcgtccaacttttagatggataagtgagtgtctcggacgatgttttgggttgttgctttttgtaacttttttgtcaagtgagtaaaagtttacgtaatgacatgataaataattgcatgatttttgaaaaataaacccttaaaagtttggggatgaaaacaataacttaactttctacaagaaattgaagtaagagtttatgtctataatagtctcttgttattatcataaaaatgttagttatctaactagctacttgtgcaaatcttttaatgagatatattaatcagaccttataatatcttattttgaagtactaaacaatggtgttatgctggattcatggttaaagttccacttttcatttcaaagatattttgccagcaagtgtttcggggttaggatgactgctattttagtttaaaatgaataataggtctcgtatttaagtagctactagttattaggcccggtcaatgccccgggtaagaaaaaatttcatttattaatataatattttatgataataacactaaatacaacttagtctagtggtgacgactttaatatatgtacttaaggtctcatgaccaaaccctacactacgcaatttctaaaaaaaattgttgtacatggaatacatgaactaaggtctcgtttggttgcactagagatgtaaatggatcgggttcggggcgggtggagcatcacccgcatccatcacctgctaccatccgcaccacccgatccatccatcacccggaaaaatcaccacccgaatccgtccatccatttactttcgggtgaacggatggatcgggttataatcgggtgaaattacctcaaaataatgctaaccataaaatttcagaaaaataaagtttcaaccgataaaaccatagatccacaaccacaattcaacttaagttcaaaaccacagtaattcgcatacagaaattaggagaattaggttgggcattgggcttttagatttggacatttagttgggccttaaggattggacctaaaatttttttttaaaaataaacgggtgatgggtcggattaacgggtcgggtgatggatgaaaattgtccacccgaatccgatccatcacccgcatctgttaatccgtcacccgttaaccatccgtttaaaccgggtttttcacccgtccattgagacggatggaccgggtgaccgggtggtccactggatattgccatctctaggttgcactttggaagttgaacttcccttgatttttcaattcctaggaagtaagcaaaattgtttggtaggctatgggaattaagatggaattcccatagaaagtggcacttacctagggagaactaggtaagcaacttccctcattgtgtgggaagtagaacttcctaggaagttccacttcctatgctctagttaaacaaacatctacttataatatcgactcttatagtatgattaaacgttggttgagatggtaattgtgtcatgtataatagcaagaggtcacatgttcaaatcttgttgtaagttaattctacttttgttaattgacatgacttatgtatacataacctcttttttttttggaagagacccttattttctttattaacgtgtgtatgttctccacttgtcctcctctttattctctctgttccatcatatagtgtttgtttcttttttacacgatctccaagatgaaactttgacttttaatatcttcaacctcatattaactaaaaaatataaattgttgatttatgaaagtacacgttgagacaaatctaacaatcaaagttattaaaatcgcgattcaagtcttggaatcttacgattttacgattcaaaatatggtagacgattcgattcgcgattctagacgattctatacatttctgttgactagtgaaacctcgcaagttaaaatcatgctaacaaagaaaataagagatatatattacttcctccgtttctaaataagtgcaacatttgcatagtgtttactattcacagtttaacctttaattagctttggtgatttacattttaggaaaaacatagtcatgtgggatcttgttagattcgatgccaatgtgaatttttttaatatcaactttttataatttttacttattgataattgaagatattaatggttaaaataatgcattgacaaacgtgaaaacaagaagtgttgcacttatttagaaacggaggaagtattagttattgccaatatagtgggtaaacaactattttgttcaatttttaggtcttttaacttataattttagcatattcaatgaagattgagtgcaatatcttgattatacatgtttgtagaatcttacgattctacgcttcgattttacgattcgattctaaaggttattttcgattcaaactagaatctcgattttaacaacattgctaacaatatcacatatgagtaggatcttttgtatataataatgagaataattgatcaaaaattttaaaatttgacccaccaaagatgaaacaggcactatattattattatgggacgaagtgcgtataagttaattttagatgtatttttatggttatgaacaatctacttacgaattgacaattctattttactcaatatttgaaaattttactttcattttatagattaactatctccgtgaattctgttttcatatgtgtttagatcaatctttttttttttttgaatggaaacggggaaattatcattagtaaaacgacatacgacatctacaatcataataatccttacctaaaatataatctaaaatatcaatctgaaagttgtcatccacgctactaatgtagacgcttcggaaccgctgtcgtgatagggtatcactccaaccataatcgattttagatgactcaacatcgttaaagattgatgtaatagtaacctaaaatctcaacttcatctcgatattcttgattttcagccggagagtatgatttctcaaatctgtaaaacgatgctttaccagttccacaaatttgctacaagccaaaacttccaaatctatatccctggatccatacacgataaataaaccaaaaaaaaaaaaaacaagactaattgacccactacgaaagaggtgactctaaatttcatgaagggaacaaaagccatcacacaaatgagacttattgaaaccataaaaaaaaactttgttaaaataactttgttgtttgacttatttctctcactaaaaaaagctttttccgttgaagtttttgaagacccgatcaactatcagttacatcattgtcttattcctagctatacacccaaaataaaaataaaaagtttaaccccattacaaattatatgtcatgcataccatttttgcatctggtattatgtttatttcaaattctgaatgcaactacgggcctgttctcttgataaaaattggaaccgaaccgaatcgaatcaacttatcaaagctgaatcaaatcgaatcgaacttatcggagccgaatcccagacttatcgtgagctgaatcgaatcgaatcgaatcgaatcgaatcgaatcgaatcgaatcaattgaattgaattgaattgaattgaattgaattgaattgaattgaattgaattgaattgaattgaattatattatattacattgaaataaattgaatgtaataaatatataaataatattttaaacaataataatatgaatattaaataataattataatgataagtaataataatgaataataataatagtagtattttgaatatttttaaatgatagttataaataaataatcttaataatcataaattaataataataataattaatgatagtaatgataattaataataattattttatattatttgtattaatatattaatacttgacgatgatatataataacaataatatctaagaagtaaattaatattactattttaataattatatttaataatttaaaaatatttagtaataaaaataatgattgggttggaccgcgaaaattatacaataaaccgtcttgacgcgatttgattggtttatgggcttaaaaaagtgggtttatttgtgctttgacctaaaccatgttcctcctaataataatagtaataataattagtaaagctacaataagaaaaaaaatatagaaacaacaataataataataataatacttaatagtaatgatatatatttaaataataataataataataataatagtaattagtaaaataaattataccaacataataataatatttaacaaaatggttatataagaatagagctgaatcgaatcaatcgaatcaatcgatccgaatcgaatcgaacttattggagccgaatcgaatcgaatcaacttattggagccgaatcgaatcgaatcgaacttattagagccgaatcgaatcgaatcgaaaataagctggggagaacaggccctacatgccaacaaattaaatcaatgatagataacgctagaaagtgaattttgcacaaaaccaacttaagttttcacttatttagaaactcccacctttgtttttttttttcctaaatttcctcctaaacaaattaccttaggcacattatgagatctcatattgtaattattcttctcgttttcacttaacgaattttgccaaactccgttaatgctgggacctacatcagttatttcttttgtttttctctccaaacaactcacttcccctttttatataagagaatttccctccaacacaagcaacaaagtgggcagacctccttctgataagatgtagcttaggtgaaggatcaaaagataaaaaggaaaattctcttatattaaaaggggaagtgagtagtttggaggggaaaacaaaagaaataattaatgtgggtcccaccactaaggaaaaatctgttaagtggtgggagtttataaaggttttgtaaagtttaagtggaaatttagggaaaaaaaaaacataaaggtgggagtttctaaataagtgaaaacttaaggtggttttgtgcaaatttttcctagaaagtagaaaccaaactatttgctgtaaacaaagtttagtaaagacaatttttacaatgaaagttttgttttactttatatgtataaaaacataattatgtcttttttttatataaggtaagataagaaacattaggctaccctcctcgagaggatagcacctaatgtgtctggataaaaggatggaaaaacgagaagaataattacaatatgagatctcataagatgaacaaactaggtggccagtattagcaatgcagtcggctgctctattgacttcttctgaagacatgtcgtacatgataagagtggaactttgagagtaatgattgtgcaaacataatttctgaatgtgcaaatatactttttcgatgtacaaatgaatttatggatatatgagatacaaaataaatactcgtatgcttgtgcaaacatagtttttttgatgttcaaacattcttttcgtacgtacaaaaattatcgtggatgttaaaccacaaaatagatattggatgtgcaaacataaaagtaaaaaaaaaagattatggatccgaaaatatatttgttagatgtacaaacataatttggatatataaagaaattttggatgtacaaacataatatttgcttgtgtaaaatgcgataataaaatacaatctaaatgtgtaaacatgattttaagatgtgcaaacataatattatattgcaaatttactatttagacttttcagttaccctccaaaactccaaagtgaaaaggcaaaaattactttaacctttttgacgccttttatattttgcaatttgcattttattagaatttaaagatgtatctaacttactatatggaataaatgtaatgaattcaatttttcaaatttcaatgattcagtcatcataaaatattataaacctaacttaggaaaaaaagatattatataataacatactggactagattcagacttcagaaaaatttccgaactggacttagaaaaaattcgaatcgtatttacactcaatttctcgattccaaaaaactttaaacagtatttgaatttggcaaaattcaatccaatccgatctatttacaccctaccaccaacaacaactagcacaataaagaaaaattgcaaacagacatggaaccacaaacagacaatacaacagacatttctaaattctaatactttagtttaggcctcaatctaaggcaaagtgtgcgtggttagaaagtacaacaacaagaagttgtctaaactctaaagtagacgtagtgaccctcacgatgtttcatgtttcctccttacttcttatttcttaatgcacctcacgatctctcttttctctttcttgtttccctcgctcgtttcggatcaccacaagtaaccttttctccatcactttttttccatctctctctttctctttctaatcagttaatcaacaacaacccacaacaacaacaacaacaacaacaatacacagctaagaaaccaaaaacaactcttcacttctctcttttgactttccttcatcctacatttctatcttcttcaattttctttcagacattgtttttgtttttctagaatttaacccttttttctctgggtgtagttgagaaagaaaaaagggttaaattcagtactcaaatttgagtactttttatcatctgggtttttctctttgattaattgtgagaattgggttagttttttttttttttgtgtgtgtgtggttgaaagatggggtttgatgaacacaaggaagttggagagaaaagtggagcaaaaaaagagatgataaacacagataatgaagagttagataaacttggaagacaaatgagtgataattctctttatacaactgaccatgaagaagaagattatgagggtaaaattgaattgggtcctcaatttaccattaaagagcagttagaaaaagacaaggtctttttgtttttttttttttcctttatttagttccatttttagaagtaataacatttttgttatgatttgaaatgttcataattggtatgttgtcaaattgggaatgcaggatgatgagagtttaaggaagtggaaggaacaacttcttggtagtgttgatttaactgaaattggaggtaatttatcttgttcagtttttctctgttttttttattcatattgtggtgctttgaattggaattttgtaaattttgccttgaataatgatactttaattgtatcttatactggaacttttggtccaaatttatgttccatgatgcctgtcctacaattttttgatgatttcctttatcttttatgagcttggtaaatgcaatcaatttcctcctgatctatgagtaacataataatggttgaagatataacaaaattgttgcggcaagcttaacaatgattgaatcaaatggaaggggtgggggtggggaactgggtaaatgtggcaatcttgagaatttttctggcctagatgaattgaagagtccatttttagctgggggtttcttattgttaatcaagttagtgaaggattacatcagttgattgggaatcggattagttttgttattgtagatacaatagctgcttgccatacgaagcaatctctaagctttgattatttcaagcaagatcaagcctaaggaaagggaatcattgagttattgctacacttcagtttctagatgatctggtgcttatatgttgatggaagctctgttactcaaactctttaaaagttttggacttcttttgggtttctccatgtcatttagacgtttatgtgtttctcctgtgaatattttgagataataccaatgtacctgtatatatttaaggtgtttggtttgtttctaacacgaccagacgggtgttggaaggaaaattgaagagtcggagtaccaaaatggcaaatgcacacaccttgctagtgtaatctttactgctggtaattaacttaacgttgagaatttggtaccatggtgtgtgcttgaactttttgggtgaccgtgattggaaaaggacaagaggtatatagatgagcaactttactttactttccttgtaatgctgaattatcccttagtgatgattctttgagttcaagggtcctataatgaagttatggtattaggcccagctcttttaagctactgctctaatggattacatgacatgtggcatctaacttatccccgagttatgattgattcttttccggaaggttcagtccaacatgatgattagttcctcaactattagttttaaagtaactggatctccatgccacacaatagcatcttcatcattgctagctaagtgtatgagcaaactttaagcattatgttgttttcctagcaaaaaagtgtaagattcattattatagaagtttttttgtttactttagcacaaattattctgtttttactgcatggaaacttttgaatgccttgcacttgtgtaacaaattagtttaagtttattgcagaagctttggaaccggaagtgaagatcctaagcctttcaattctctcaccagacagacccgacatctttcttccgattccagaggatggaaaaccaaaatcaccatggtttactttgaaggaaggtagccgttacaaattgagattcacattccaggttaaccacaacatcgtactcgggctcaagtacgctaacactgtgtggaaaactggcatgaaaggtgtgctttttctttttaacagtatctcttcatctcgtttaaaatattgaagatcaaagatggtggaaaagctggttttaactgagcttatttacagtggatagcacaaaagagatgttgggaacttttagtcctcaaccagagtcgtacacacatgaaatgccagaggagactaccccttctggttactttgctcgtggatcatactctgcaagaacaaaggtcagtctcatccattatatgatttgttgcttgctattgtgtgcagactttcgagatgtccccggttttagttgtttggctcatatttcttacaaccgttcatattataagtctttatgttatggaggggaaaggtaaaattctagtgagccattacatccgtcaagtttacacttattcctgtagagaacgatcaagaatcaattaccaatatcatctatctatactatgaatttaaatgctgtactctttcacaagattttgtcacatggcattcgccatttgacaatgacatggcagccggcaagccttacaatgagactgatttggcacaagttcaagttgatttctcccaatagtagtttatcccttaaactcacatccttttgtttcatatgatacacttcaaccatcaaatcagtaaactaaagtgatagatcgagaaaaaattatatgctaataagcagagtgtaacaatggtgaaggtctgaagtattaaagtcacactctatatatgctacttgacaatcaatttaatactccaatattttttcatatattcgtcattgtcataatgatcgccacaactatgatgttggggatttttagcaattggctatttgctattggccgttagttgttggttgttttactttgcgggtttgaccagctgtttgtattggctggttatgttggtgtttgacttgactataatataaaagagtataatatgtcttcggtgctggctatataacacaaaatgaatgtaaaagccaaaaggcaacataaaaagctagtaacagcggctttttagctactcattagccatgccaaacatttttttgactgtttaaccaaatgaacaagctaaaagtcaatgaaaaagccacccaatcgtcatttaccaaaacccctactaactagccgccacaattacatgtctaattgtccgccgccaacttccagccccatcattatgctctatcaaccatgacaacgtattaaaaataactatgataagtttaaagttacattgaaaaagttatgtgcatctccacttggggaaagactagttatctttggtgtcactattttagttaaaatggttttactatcggtagtttatctatttgttctatctttttgagagaggacaattttgaaaatcatgtaagcttttgaaacatcggtggtcatatttcaatttggaatcatctttttttactttaatgatctgtcattactcattactgttagaagggtaccctcttgccttctttctctaattatctattattactcaatagtgaaaatagcaattcaaataaagttaattcctcccatctcaacttattagctcttagtaaaatggttttcagatcactcctagctttcaactggatcactttctcttcccgtcctctttccactatgcttattccctgccactgctttcagaatttcaaatttgttacggtctttagctcggcaacctttcattctctggaccacattgatgttcaccacagtcatgtgaaagatatgaattcattcatcttcattaataattttgatgtcccagtctgcggtaccgcactcccaattttgtttcgctgtatcttttttttcccttgtactgaatttaattagttcatgcactatggacttgacaagaatacttcttgatgtgcgttttcttaagtgtttattgttcttcctaaattcatcatgcactatggactttaaccgtgtttatccaatttttatataaatttcatttgaacttgtgaaatcttattagattcgtttcaatatatgctcccaaaacatcagtggcttacaattaagaaactaaacattggagaccatgaaaaataaagtatgaagaacaagaaccagatggagtggattgtagccgtttctagaaacatgttgcattcgagaaaagtcacagcacatccgaataagtgacatgaattgtatcttctcttcttattttgcagtttctcgatgatgacaacaaatgctacttggagatcaattacacattcgacattcgtaaagattggcttagtacatgattggaggagttaggcgtgatcaagtctctatgaccaaattatatctaactcctggcccccaatttattctctcaagatgaacataggttctcaaacttgttatggtcactcaatttgtttccttttcttttccgttttctcaagcatattatttggaaaagaaaaaaagaaagaaagaaactcagatatcttcttgtgtaatagaagtagctaactttgctcagtttgctgttttcgcactatcttgattcttggacactcaaaagcattatcagtctaatggaaaaatgtgttggtttcttacatttttttgaaaaaaacttttctgctttctttctatcataagcaagtttagcttatcattagttaattggtatgggtgacttattgacttagagtatatccaatggttggtcctctgacagtttatgaggagagagaatgctaataaaacaataaacaattaagagagagaaaaaaagggaggagagagggcgttgcccagttcacaaatatgaacgaaaagcatcaattgggtgtgacaagtggcaaagtataaatggttcatggggattgtgtatttagatctaaaggttgataattgattgtgatgaatggttgagattgtgagccaatttgttcatgctttttttgaccctttttacaataacggtcatatttaataattaaaaattaaattttaaaaaaaaaactttaccaacaactctatttttctattctctataaatagagcctaatattgaggtatttccatatatttttcatacacctctttttcattaaacacttatttaagatatgaatccaaaaatgggaggaaaaaaaaccaacaaaaatccaaaaacactccacaaccccaaattaatccaaatttgcaatctttttgtaattctcaaattgatctcaataattatgttgaacccagttcacaaaactttccacaatatccaaattactgaatgcaaaatatgagttctgctactcaagattcccaactatatccgtcacaaaatataagtttctctaatcctagttctttctcccaattgcctccttcacaacaaaattttgttatcccaaatcatatttcttagatgaaacaatttttcctacgtcccaacattttcaaacatcacaaggtggacgttcacttccgaacttcaatagttcatatcatacccgtgctccatctgttgaaggtgacgacgctaatgaagaagaagaaaatgatgaaaataatgtcgaaggtggagagtcacaagttgaaaagggacaaagaaaatattggtccgaagtcaagaggaagttctagtaaagtcttggcttcagtgagtaccgacaagtttcaaaatactaaacaaaatggagagaccttttggggtagaattacaaatatgtatgagcagagttagagtatacgaaaaacaaaatgtgggcgaaagagtcaagggatgagagaaactgatctattaaaagaaagggaattagatcctctaagaagtcgttggaaacgaataaatgctagtgtatcgaaatttgttggtgcatttgctcaagcagagtcaaggagaaaaagtggcgaatgcgatgatgatgttatgaagacaacttatgctatttacaagagtgacaacaagcctcaccatagggattttaatgaccggcattgttgggaaattcttaagagttgtgatgtatggaagccttatggggatattgttaacaagtgcaagaagaaggcaacaactcaagaaagtggttcaaagaggtggaggattaatgaaacaggaaattactccacttcaactaacccaaatacaccaactagtggtgatatagggtgttctcgtccaaacaccaagcgatgggtccacaaaaaataagggaaagggaaaagttgtgaacatgccatcagaagcattccaacaatgggtggataatattgagaaaataaatttatcaaaaatttagaaaccgaaatggaactaactaggtcaagtatgaaagagaatcacaaattgagaggttgaaattcgaaagggaagctcaaaatgagagggtgttgttggaaaataggaaagtttctatgaaacaaaggaagatcaatttggaattattcaaagtgcttgcatcaaaggactacttgatgaagaagaggaaaatttaaagagtcatttagtgaaagttttatttccatgagatgtgatctcatttattaatgtaattttaaattcgtaggtgtgtgttatttagttgttgaattatgaatttagtgcattattgctttcttcagtgcattattgctctgtggtgaaatgaccattcaattgctttcttcagtgcattattgctctgataaatactgtagtgaaataactttttacttgctttcttcaatgcattattgctcgaaatgaagtgacaattcaattgctatatttagtgtattattgctcaaaatgaaaagacaattcaatttgtatattcaatgtattattgctcctcaccttttctatatatttacttcacaatgctttatacttcaatatactcagctttccacacaatatctattcttgtagcatcaaataaattctctataatgtcatctgaatcaagttataatagtttcatttcatcttcaaattcttctagttccgatgatgtcaattttattccaccgagatcatatagcgtaagaacaaaacaatgactacatgcggcgttttggaagacgtgagacgtgcaaatcgtatgatggaccaaatgatggagcccttcattttggctaatccaatcgaagtatatgcaatggtaactcaagttcctagggcacctaggcaacaagttgatcgaaatcgtgtggatgcacacactcgcttatggaacgactactttgccgacaatgccctctacccccacgattatttcgccgccgatttcgcatgcaaaaacatgttttccttcgtatagtagacgtctttgattaataagaacacgttcttccaacaaaggccggatgccacaggggagacttggtgcatcaagattgctaaagtgcactgcggctataaggttgttagcatatgccacatcaagattcgagtggacgattatcttaaaataagtggctctcttgctagagattcactacaacattttgttgagggtgtggttgccgagtttggtgacgaatacttaagaagacctaatgaaacagtttaacgagattgttatatgcgggtgaggaaagaggatttccggaatgatgggttctattgattgcatgcattggcgatggaaaaattgtccactacaatttaaaggactctattcgggaagagccggtaagccaactttagttctcgaagctattgcgtcatatgatttgtggatctcgcatgctttctttggaacaccgtgtaggtgcaatgatataaatgttcttgatagatctccaatatttaacgatgtatttgaaggtcgtggcacctccaagaaactatgttatcaacggccaccaagatgtgacatgggttattacctaacagatggtatatatcctcaatgggccgcgtttattcccacaatatctcttccattgaatgagaaggaaagcctttttgcccaaaagcaagagagcaaacgaaaggatgtggagcgtgcatttggagtattacaagctcgttttgcaataattcgtcaaccaaagattagctcgtgataaatatatgctaggaaaaataatgtttgcttgcattataatacataacatgataaccgaagatgaacgagattcgtactcccttcgttttgatccacatgattatgaccaagattttcgcccatcctcaagccgacgacaaaacgccgatgaacctttttatatatcataatagtgataatcgcatcggaaatttgcagacattcatgaacaatagggatcgcgtccgtgatcaagctatgcatagacgactcaaattggatctcgtagaaaatatttggcttaaattcgggctaaacaacgagcaaactagttaaggtgttgtgttatttatattttttaaatatggtgtatcaatctttatttaagaaaagtcggtaatgtctagtaaaacatctatgtattaatgtttgattaaatgaaataattttcttgtacttaatttttcattcatataatttgaagaagatttttaaataattttgattaacataaataattagttatgatacaaataaaaaaattataaatattataattactccaaaatgataaatatggtgaagaattgagatgaatcaaattaataaggagagagaaaatataatggggtatggtaaatagtaggagagagaatttgatgaccacaaaaattggtctaaccattgggagtaagaaaatagaggtttttgagtagattgggtatgagtgatgtggaggagagagaaattaatatagtatttgataaaccctttgaagagtctaaccattgaacatactcttaaggtttaccatatgtggaaaaagaatgcccaaggcgcaataattgtcacccttcacttgctttaaaaatttgtatagttgacataatcatattattagttgatcatgtcaaatgagtaactgacaatgtaatatgtatacttcgttactaaataagtgttacatttatttttttatgtaactcagtgcgtagttcagattattaatatctttaattgccacaatttaaaattataaaaagctgatattttaaaagttcacattgaaacaaatccaataaaatatctcttgattatgttttttgatcatataatagcacgaaaatgggattaaagttagttgatgcataatgttagtgtactcaatgtaacacttatttaggagcatatgaagtatttaatttctctattctctttagatgcaaaatttgcctttttggcgagtgaattaacatcataaaatgttgtttatcaatgacaaatatagtatatagaatttccaacaacgtataaaaaaaaaagcatttttaaagactatatgatgggggtaattgttgttacatacttacattaattagtgggatttagctatatataatttttaggggtcagtataaagtttaaatggattattgataagtccacaaatatttgaacctatgatataacgctgttagcgaagcatctctttggctgtcgccttggttgaatacttgcatgacattactttgaagacttttaagcatgtaatatcttgacgtttgaggaaagatatgtgatgaatcacaattggatggtggataattttggggagctagtcgagctatccttggttaagcccgactaactcggtccacttaggcctagatgagctaattagacgtgatatatgcatataaattggatagtcgaagacatccaactccaactgctataagctttatacattgataggtgcaaattggacgaggtaggaaaaacaggccacactcgcaccaatagtttgagcccagtctaggcacatgtatgggggaactagtgtcttacccttattcttttaacaaggttttgggtgggcttactccctccgtcttcttagagcatgtataatgggtgggttggtcttaaatggtttttgagtttttttttctctctcatttcctccttcttacacctcacatcccactaaaactcccaccaactcagttttttatctcacaatggtttggttggtcttacttggtttttctatttctctctcctacttttaccaaaccccacaatatttactctcttcttctacttgtatttttatatgaaatagatgatttcaattaataaaagctaattagattacgttaatttaattatgataaattaaattacgttacaagttaattagcttacgttaaattaaattagctaattagcttaagttaaattaaattacgttaatttgacattataaattaaaaaacagaacacatacataagatagaaaatttaaaccatacacaaatgaaattttagtgagatgtgaattttgtgggtggtttcgattagtttggagtttaggattatttgaatccacaatattggcttagtataagtaatataggtaggagagagtaattagaaaattaggctgggaagaagtttggtaaaacatatgaaatttggactcaatttatacatgaaaatattttatacgcgttattataatttttttaaaaaaataataagctgattttttttattaacattacaaaatttagaacgttgcaaattaaagggaagagtgttgtagacaaaaatgcaagtggcgtgctaccattggagagtcattggtcttgtgcactccatccgaggagtcgttagtccgggaaatccagaccaaccaactccaagggccaattgccccaatagcaaaactaaataaagctagctttactttttgctagaccaacctaaagccaacccattgtacatgctcttataaattataaacttttcatttatccttttcacatttaccaatgtacgttttgtatcatgagtacttttagttatatatcagtaaacattataaaaatttggttttcgtaatttacttaatgagatgaatcaatcaagacctcaaatgactatgttttttttcttatatattggaataaatattatgtgaaaaaaggaatatattctatcgaagtttcaatgtgagataagttagtttgcttctttaaaacaaatgttccttttaaacatccatgaaaatgatggataaatttagtttgcttctttaaaacaaatgttccttttaacagttctattggtcaatttatccatcatttttgtattttcgccttaatgtattatttaaccatttttcttattgttaactgatggaagaatttataagctgagaggacaaagaaaaggacacattttatgattaaaagagaggaaacgcaatttaaatcatatatgcatatttccaaattccaattacacgttcttttcattacacctgaatgttcttgtcatcatatttacatatcgtcatgttattttctatcaattcctttcaatatattttttttactattgtttttctcccaatttgttttcaatctaaacattaaaaaaaacttgtagatataaggaaaagaatatccaattgaaatttaatggagagaaaggtgctattttagtggagtatcatcccgaatttcagggtattgtcctcggtgtgaattctcatctcaacataatgttgaggattattcttgtgacagcaatgagccttcaggtctgttgtcttctgggctgtttaaccttgtctccagcctctgagctagtatacgctgcaggctagtgttctgataagggtttagtatttgagtcaattatctttcctaattaaaagaaactgaaattttaatggaataatatttagattacttaccagttaccactgctcaatctaagcattggaagaaaaagttaacgtttactaaaagagattggtttagcatcttttttattgaataaatatttcttgagcaacacttttgtctttttaagacaagagtaataatcttgtaattattgagtgaaactatgcaattaccggtttaccatttcaaagggtaaaattatcttgtaattattgagtgaaacacattgacgtcggcaaaatgtttaccttctactgccagaaacccagcaggtagtaccgccgacaccctcatacaaggaaacctaatcatttggttggacccacgataatcacatgtcaaatttctaagcagtattaatccaagctaccatgagtgttaaaggtaactcctagggtatgtttggttcactgaattggaatggaatggtatggatgtccatatcagggtggtatggattcaaaactccataccagtttcaaattgtttggttcaatcctgtaatagatttaatgtccgtttctgctatttggtttacttttggaatgaattctgcatccagttttttactttaatataattataccagctatatgtataaataaaaaagacataaatttatataaaaaaaagacaaaaatttatataaaaaagatagaaattgagaaccagaagacagaaaagcgagagagaaaagcgatggccgcaaggagtgcaacgtagcgcatcggcagtgagacggtcggaaggagtcgccgacgaagtgggaagcagccggagtgggaaaagcgagaaagagaatgaccgaaaaccgagatattaccgcagtgaaagaagctacgaataagaaaagcaaaggaaaaatgtcggaaagaggacttccacagccagtgtcggcgccggcgccgggaggagtacgacgagcgagggtggtcgccgacgactggcttctcttgtctagggtttaacctctatctctcttccacataaattagggtttgaaatttgaggggaatgagttagaaacttaaggggggatgtgagattggggttctaggggatggggtggagatagatacccttgggtatgagactctatcctaaatatgcccaaccaaacaatgcaatggatgtcattccatttcattccattaaaaataccccaaccaaattgttttctaaaaaagatgaagtattgagattgatacatctatttattgggtatattattcattataaatagataattaaaaaaataataaattatgttaaattgtactacacaaattattaatgtttatttctactggatagacaaagttttttccatgatacaagcgactcccgtcatttaaattaattgtacaacttagtgtttgttttcttcgacataaaaaaaatgaactgaacttattgcaaccgaacataattgaactgaactgaaatgaattaaattataattaagaaatgctagttgtagctgaactgaattgaactgaactaattgcaactgaagtgaactgaaaataagttgagaacaggcctttacttatacctacaccgagtcgtatacaataaaccctatttaagaaaagaaagataagaacgacttgtaacatttaaccttgtgggctaatgctttttttccaattaatcaccacttttggcttgcaccatgtgttattttcaaggctttgttataggtcacaacattatattagcttatttgcattgcatgcttacttcattcacctttttaagttttatattgggatgataggtgttgtagtctaaagatcggtggctctaagtaggacacgtagattcatcttgatcgtccacatgtctcttgcttattgaagaaagtacagtgccaaaaggaggattgctggagtacaaatcccaatttggagaagtaccagcccacctttctggcctggtttgtacttgggccgagaattccataaaggcacctgcataaggttggatgatgtgtgctctccaataaatgcttgccacgtatcatgatttcattgtttagccaatcaggtgctcccaaattatggtaacctcaggatataacaattatcccatacactacaaatagtccttgaaattaggagaaagatacgtttttcagagcagtgcattgttactatgtcataattctctctctaaaagtttcctttactactcctgatacttgacttaagtttcggaggggggaaataccatccaaacctccagggtgggtccctttttgcaggtccgggagcggagctcaggttcgagatattttgatcaaggcattgttgcacgagtctctaattgaagaacatgttgtgggaatagcagtatatttacgagtctagaactacgtaacatttgacaaccatctgtggggagatgcaacaatgactaattgtcactaatctaatgtagctaaaaacaaaagttttgaaattcgagtagaggacaaggtggatgacgagaggccaccgtgaggaagggataggtgtaacagcccactcgtttagttgcttaacccattcatgattccgctcataaacccttagtcgatcatgagttaaacatctaaccagagtggtgttactgaaactacctcctaataacaagggggtagcccaatgatatcataattaacctacttgataattagcaaatgaaaataactaccaactattacatcctaatctgagagataactaaatccaatttaagaaattacataacccaaaaataaacaaactatttataaaaacaaaataactcaaaagtccaaccttccatgctccatttttaactacttgaatcacatgcatacccaagtaagtaatccttcccaccttttcttcctattcctgcaaattaggggaccctgtcccccaaccatagcaaacattccacaatatactcaatcagcaaggctggtacacaagctccacttatcacaaaagaaataggaacaaaataaacgtgtctttctaaataaaaaatgtttcttattaccattccgaagatcttaccaacagtttcaaatcttattcacattgtcttgcacaattatacaaacggttgggaatagatataaatagatatatgatccactttagactcgcataatttcgattagggaaagagaacctgattagagagatataactgtgtctagctgatgagggacgtctcccttctcttatcatttctgcttgcaagactttcaggacatgtcccaatacacattcatattccttatcattcacataaacaaacatcactgctaagcagcttatttccccaatcgtttcatatattcacaagttaaaaatcatcattcttacaagataaatatacgaaacaaaacttatttagagtgttgaggaaaatcattcttcaacaaagatttttttagaactaatctcatcatgtgaagtccccactaagagaataaaagaatctttattacatcaatttatttgatttaaagctttaaggaaacgttatatactagagaaggaaaataaaaatagttctttattcgaaatcactatggatacctagttgtaaactattaatttttttaaagaaaataattaagtaagtgaaggttgagtattaatcatcaagagttcttttttcttaaggtaaagtaaactatacaaagttttctgtgaaattatgaaattcgaaagtatagtttaagattgttattcaaattattcctcgagaagcacctattattaatagggtcttatgtatctaaatattactttgatagtattgttacattaataaatagaccttgaaatcgaaacaatccatttttgttcttttccggtagaaatataatttaatcgttaaaagtgcttaatcatcataattcaataattttgactcccatactatgatattaagctactgtccctttatgttaaattactcaaaaattcttcttaataaagttcttaacacttgagacaaaattcaatctcaaaagtctagtacgatagtcacaatttggtacttaactcaattttagttattaggtacttgtatccactaattcttaaaattaactatagcatagctactgccatattatgtataatttaattagaaacttcatacaaaaaaactagatacatatccatgaattataatgttcaaaaatcatgtttttgtgacaaactaagcataaaactagtgggaaacttcacatgcacttgattagtcaccaaaaacagtaattatccaaatatatattcatcataaaaccacatgcacacaacaatttcagtagcaataatcacacacaaacaatttacgtaaatttttaaccaaaatttagtgtcttagtgtaatgcttgtgtaccttgcttgcttgctagctttttctctcctaaacctccttgaaatcttgattctctactgaacttcttagtacctatatccaaaatgatatatcatcaataatctcacaagaatactctcaaaaatcaacccaaagaatcaatttttcaaccatacattacttacctcacctatctttttcttcccttgaccttgattaatctccttggacctttggcttgaaaacttttcttcccaatacctattatcaactgaaataactagatatcaacttgcatgtaaattttgaggagtttttatgcagcaatttaggagagggagacgaagaaccaaaattggttcctaaacaccagaacaagcgagtaagagggagaggaaagatgtttctgggtctttctggttttcactctaaatggaatgaaatctctaccctaagttcccctatgtatttaagacactctcacgtaatttttttaaactttgacggaatttacaaggtccaaaactctggttcccataaaggtgtgttcagaaatttctgaagagtccccatttaatgttttaccttggtttacccacttaaggcttagatatccacttgaaaatttaaacatagactcccaataagcccatattcatacccaattccttttctcctcttggatctatctcttttattttatttaaaattatttcttactaacccgttattcgtgaattctataaataaattatttaacaaagcattcttgtaactaataatgtgaaacaaatcttaatcctattacttgatattgtgtatttaataaccttaagaacgtttattaattctaatattccacttattcaggaaggctatttcaataggcctccagctgttgtcaatatctttggacgaagccgcgagtctgttattcaggagaatcttgagcgtccagtgacagttgtgcatctggaaaacgtcttgaatgactttcagactaagatggatgttgttgtttaggatcagatcaagagtaatatgttgtttttccaagtgaatcaggatctaggtgctaacaatcctctaaagggacgttttctggagggttgtccatgaccaagcaggcctcctcgtcatgaattgtctaagaggctcaccaaaggaaagcaaccggaggttagtgagcagcgcaggaagattgactggaagttggtagtccgaacttaagacaatattcatccaagtggtcatagaatggagatcgatgctagagagtatttggaagccaaaaaggttgatgctctgcaacgttcaacctcacgatccaccctctatttaagggatcctcctttgaggctgccgtccaagattaagggaaaaagtcttccttggacccatgctcctcgctagtagtgttccgccgatcgtggtggtggtgtcctgtgtttgtggtgaagggtgttggttgcgatggtggtggcggcggtggcggtggtccggtggttgcgatggtggtggcggtgatgatttggttgcagtggtggttggtgtggaggttggagtgaggtgaaagaagagtaagtgtgagtgagagtgagtatatttaggggtaatttagaaatatagtgaatttaatacgggcgatttttaataaaatacggatagtaaatagtagtgcccctaaaaaacggaagaagtagttaggagtgacactctcaagtttcaccattgtgcatgctcttatagttatatataggacaactatcaaatgataatcatttaccaaaaggatcctaaaattgaacacaataaatccatcccccaaaaaatgcatattagggtgctattttgtatccctgaaaattacatagcaagagatgcaaaacaatgccatgatacttaatagtaatgatggggtagagtgcaaggttggagacccataaattgtgtacaattataagtttgagggttgatttggaaatcccaccttacatcaacatattctagatctctatttccaacaaaacactcaaataccattataattttatactatagttttctatacaactttattttgtggaataccttcatgtagtttagcaccaaccaaatctttttttatcttaaggcccagctcatgagcagcttttgaaagcttttacctgccaattacactcagaccctttaaatacactcacattttagccttctctacaaattggcactctctcacttctcttttctttggcgttctctgagttattatttacaggtaagtcatcttctttctttttactttttttattttttgcatttcatacatgatttttgtttgtgtaatctgggttttgatctattattatgtttatgtatgtgagtaatgtagaaatcatatctagtttgtgggtaattctgattttttagtaaattgtttcacttgtttttactgtttttattataaactgatctagatctgtttccattttaagttattatttgcattgactgtcaatgaaataatgtactataaattcactgcatttacttaaaaaactactgaatttgaccaatttgatgaagtttgatctgatttatggctaaagagttgagctttttgtactttgggtttgctgcattaagttcaattaagctagattttggctaattagatgcttatgtagaatgaagtttagaggtattttaatctctgcatgtagcttcaatgtgcttagtttgtccctgaatctgaccatattgtaagtattttgctatcttgtaatctgatttattttttttacttgtatgattatttgctcttgacttgttgctcttctgagttgaccggccaagatctgtaattattgcttgattttagttgtacatttaatttttgaggtgtttaactgtcatatcttacagatttacttgtgtattaaagtctaactttgactgctgaagtgtaaatttctgatgggttttgctcaatttgcaggaatttggagagcttttgtggtaaaaatctataaacctttactattaagattagctgttacccaaagaaaagatggagaaaaccatgaagtttttgtttgctacaattatgttggtgatgttgagttctcctttggtaaatgctcagaaaaagagcaagcatgttccaaccccaaccccgtcaccggcccctgcgccaggaccagcctatgtaaacctgactgaattattgagtgttgctggcccttttcacactttcttaaactaccttcaatctaccaaagtcattgacaccttccaaaaccaagcgaacgacactgaggaaggcttgaccctctttgtacccaaggatagtgccttctcatcccttaaaaaaccttctttggctaacctcacccatgaccagcttaagcagctgtgcctcttccacgccttgccacactactactctctttcagagttcaagaaccttagcagcatggggcctgtcagcaccttcgctggtggcgattacaccttgaacttcaccgatgtctcgggtagcatccacatgactacagggtggagtgtcactaaagttagcagcagtgttttctccactgaacctgttgctatttaccaggttgacaaggtgcttcttcctgaggcgatctttgggactgacattccccctatgcctgccccagcaccagctcctgaggcgaaagcccctgttgctgacgctcctgcagatgtgactgcagatggaaaatcgccctcgtcctcacccttgaatgcttcagcgtcttgtagagttgtagctagcttggttctggcactagcagggggacttgtcctactcttgtaagaaaggatagtattggtggtttataacttatatggagtgggtatgttcccaatatttcctttgattgtttcatcattcttttattcccccttttttctatgagatattatattggaaacattgtatgtgaaatgtaagattggttttgagtaccttgtctatcaatatatttagctcatttatgtcttgttcaagtttttgggttttgtttggtttcctgacatacttctatgtctgtcatactatccatgttggttggttctgtattcaaatgtgcaataatgtacttggtgtagtaaggtctttttcttacctatacagtatatagatgtaaagtggagtatacaatcaagaagttgcacaaccaaggaccctcgagtctaatggtatggtttcctatctagcaaaatttcaatattgttgggaggagggggttggggcttgttggacccctggataagtgttcctgtgcgaaggcaacccagaggaaattcatcttaccacgagtttccgaaagaggtctagaaaaaaatataaaaaatcaaaaagttacacaaggcagtgaggcaccctttccttaaccctgattgcaatattttgcatcttgatttccagggaagatcaagctgtaagcctgtaatacagattaccagagggccacttgggtgttcttttgttatcatcaagttgctcaccttttttgggtgcggaagttgttcactttgatgattaaaggattttatgctaattaagacatacttggagtcttgaagaagtgacatctaaagaagaaacggctatgttgggctcataattgtctcccttctttttgctccatttgaacaaatgaacatatgaaagagcattaaaggtatattgggtgtaataaaagaatcttaaaaatgaggcaagaaatccaggtgggaattgagtggttatagtaagtcttgttgttggagatgaggtttatgaacgtgatcccaagttcgaacccccactagtacatatggaaaggtttccgcctttctccgcattgggcttgtaaatgggccgactttgatgcctcagatagatgggtgggctaaataaagcctacatgaaagaaataagaagacttaccaacacctaatggatcagaagaaaatctttgcaatgagattataagtaataaaggattttaagagatttttttcttagtaatcaaatttggtatgggctaaggctataatatatagggttagtgcgattaaagcccaatcatcttgagagtggataaatggtaagggagctcacttacaatatacatctagtgggacttcatcataatcctaacattgtttaggaacaaattacaagtttaatttggtaggttttcaataaaaaattcatactttttaaggttgataagatgcatgactcatccgtgtcgaaaccttaactcaaaacaagttagcgagctagtgactagtcactttgagagtgagggaaaggataaggggttccataatttaaagtgctcttaatggagattaaacttctaactttgaagttgaaagatactctcattttaattagaccaagtttgacatggtaggttttcaagagattacatgagacacaaatatcttaaagtatctttacataatattgtcatataatagtctattgtctaaatttaatatacggacatatgcataaaattaaagaaaggtaatatcattaattagtacatacaaagttggtcaaaacttaaaaaatttgtctttttttacaaaataaaaaagttggagatgaagaaatgaaaattaaaaagaatatttggagaggaggcatacaatgttatcttaagagaagtaaatgaatttctagggttttttcgaaaataaaattaataaaagagtcatataacatttataatacaaaaaaaattaaactagtaaaaataaacaattaggatcaaatttaatattttattttcaaaaaactatgatcatctcaatgaaatctgacatttcttaataccttttacatttaactaagctgaaatctcttttattattctattgtttacgttactcgtttagcaaccataaataataactatatgactcatatgagttagtgtgtatattccaaattctaatcccaatctcttttatttattttcctttgatagtttaggaaatgaacttaacaaaaagatttcttaactattttcttgtaccaaaaagggaatttttcacgaggtatctttgaacttttactcaatgcataagtacgaaagtacccttatgtttcaagaattgaattatatacccgtctaagttttgtaactaatacaccatatacccttatcaaaaaatgttgttagttaaccgttcaatcaattaactagaattatgagtttgaggtggtgtagtaatggtatcactttcaatctcgtgtccctgcgattgacaggtcaaacctcatgacactcatataatgattcctccttatcccccctcctaaagtgagcccctttcattttaccttaaaaacatttttattaagcaaggtttgacctaatgataaaggtttaacctcatgacttcaaggtgttatgagatcatactccactagggctctttggaggtgagatttcctttaccatccccccttcttacctagaagtgtgacccgcaaacctgactggttaaacctgagcgagatgtcagttcaacaatttttatggtttgtggaaaaggcaatgggaacatgactttcaactgattttggaattttgattagctagtatggggtttaattatacctgatcaaagtgagtctagctcgaaaaatatacaggcttgtgtagatcttttgggcccgaattttttcgagttcgatacgtgttttgggcaacctaaaatgactttttattaaaattttggcccgatacaatttcggccttaaaagcgtgttgtttatggcccaaaaaagtgggatttgggcacaaaagtttaccccgacccaccatttgatcacctctaggtttaataaacaaatttgttgatgtttgatagtcatataaggtacatagtccattttctacaaagttgaggagaaaaagtgcatccaaaatgtcaaaattatttataccatttaaaaaaaattgtaaattagactaattagctgatagatccggttcggcccctgctaagtatggttcaatgctctggctaggttgggccggttcaggtttagcccaccgattcaacttttttttttcgcttaaatgcaaaatcattttgaattttaattccatatgcactaatatttacaataaatagttttcgatactgtccatatacaataatgtttttaataactgtgtcgaggattaagaatttttatgcattttcatgaccagtttaacggtccgtttcagggttgcgtatttttcaaggttcggttcagggttagggttaagtcgattccctcaaccatcgattcagcccatgagaacccgtttgattatgcggttccagccgggttcaagccttgtcatctggcggtccaagtcgagtcggtcttcttgcgggtcggttcaaggctgtgtccagtgagccccacacagtgaaccaagtgctagtattaaactgtcaataatttttcccatcaaaaacaaaaattaaaccccaataataatcattctttatgaaataaattatggagctttgaattctaaaaaataaggatttttttctccaaaactacctttaactttcaaattatttgcgagaaaataccttataaaagaattattttcccgaactaccttatttttaccattgtattgttgacaactactttatatcagtttccggcgttgacttttgttttttagggttttttaatgtcacattatatcacttgatcagttgatctcttcaaaccattttttttaatttttcataccataactagagatggaaatggatcggattcggggcgggcggagcttcacccgcatccatccgctccacccgcatccatccatccgtcatccaccggttgaacggataggttgggtggttagcagacggggtgatatattagaacttttacaaaaaattatactataagatacatacttatttaaattttcaacttaaaaatttaataatgtaagtaaataaacatgcgtaattgataatatggatgatggatgagtgttaagcgggtgatggatcgggtggcggatgaaaaaaaatctcacccgcattcgccacccgcttttcatccatttatttcgaggtttcattcgcttaataaaccgggttaagcggatgattgatgatccatcatctattttcatccctaactattctcactcccctgtatgcacgcactctctctcatatctctgtgacattttgtaccactaatccactattaaattcttattccacttaaaccaaaattgaaacaatcaccctactcaatcaccctctcattctcctcgaatctcaagcaatttccacaagggtaattttgttttttcccacaattttgaactgaaaaaacaaaagtcaacgccgaaaatcgttataaggtaactgtgaacaacaaaatcctaaaagtaaagtagttaggaacaatttttttttgataagatagtttcttacaaaaatgtgaaagttaaaagtagacctggttattggacgggtcgggtcagggtcagtgcgggtcggaagcgggtcgagtcataagagggtcgcctcataaagggtcggtagcgggtcgggccaaatgggtagagggcttatagtgggccgataatggacgagtcggtaaacgagcaagaaaaacaaggaataaaaagagccaaaagtaagtataaatgaatgcgaatccgaatatgtaattgtttttacaaaacttattttattttttaaaattattgggtttctttgttgatcctataatggccatgtccaataatgactctgtccaataaaaccctgtccaataaaagccctgtaaaattgactctaaccctttaaccattgggctaccctgtccaataaccacctcgagttaaaagtagttagggaaaaacattcaaaaaataatataaaagcaaagttttttgaaaaatgtagaacatccaaacacgtccaggagaatttaagccgtccacaccaccaccactcttccaccgtccacatcccacacatgtagggaagacgttccacaaaaaaacaacattaattaattcattccatattctcaatatttcagatttctgtccaaaatagctttgatttcatcaaataacacaatataaaatccaaaaaaaaaaaagttttctttgtcatgctaaaacaacagagtccctaaaatctccaatgcaagaaatggcgaactttttagtcatgtatttataggctttacgtttttttctctcctaactttctctttcttccatttcaagcatgatattctgacaaggtctgttttttctctctcttcttttcttaatcttcatttttcttcatttgggtttgttgtgcagttttctttatgatcaatcatctgttgttttgatgggtattgaatatgggtaaaattttgttttttgatgttttcattgatatttatgaaatgggtattcttttatttcaatttttatgatattttgtcataaatttgattgattgttcttcatttattgtagttttgatgatggtgggttaattgcacttttgatgataggattgaagattgaacaataaaagaggaaaaaactagatattgaagatgtctggatttgagggtgtaattgtttctgatcctcggttacagagtcaattcacccaagtggagcttcgcagtcttaagtctaaggtttttgacaaaaatgctgttttatgttgctttgacttctgatcattaattttgtatgattaatcaatgtagatggtgtgtttgtttgattgtaacatgcttaatgttgggtttgttaacagttttcagcattaagaactcaatctggtcgtgttacggtatcggatttgccgccagttttggctaaacttaagggtatcaatggatcctatacggaaaatgaagtcagagctgcattggaggattcgtatcctgacgtcactcacgagatcgattttgaatctttcttaagggtgaggtttttttgtgtggaatcatgctgtaatgctgaattttccctagatggaaagtttttattgtggctattgtagttgtggccatgaagcaatattggaaagatatcatgttgttcttatgtttgcttagtttttctaatgaattgcaatgttctacctattttattatttggagagctaaaccatttcgagttttgatggcattggacaggaatatcttgggttgcaaggccgatctagtgggaaaggtgctgggtttaaacgagcttcttctatcctcagacaatcaaccacaacccattttcatgtcattagtgaatcagagaaggaatcttatgtgacacatattaacaatcagctggcggaggatccatttttgaagaactttctaccaatagacccgaaaacaagtcagctattcgaccttgcaaaagacggagttcttctttggtatacacttctggctactggatgtttttcatagttttatagttgatttgtggtttgtatacttagcctatagcttgcttgaaagccttaaaatattacctctccttgcagtaagctgattaatgttgctgtgcctgggacgatagatgaaagagcaatcaacaccaaaaagaaccttaatccatgggagagaaatgagaaccacacactttgtcttaattctgcaaaagctataggttgcacggttgttaatattggcacacaagacttggtggagggacgagtaagtcatcaacaccttgttgtttgcattccttggtatgaatatcttaaagttaattgttactgaaccactgaattgtcatcatgtagcgccatctgttaatggggttgatttctcaaattattaaggtatttaatccacttctcttcacctattggttgtaacttgtaacctctttagcttcatatatatcggatttgtgcttgcaagtatggaattgctagattcatgcaatgttcctgtatgctatgtaaatcagattcaattgttagctgacctcaatttaaagaagacacctcaacttgtggagctggtggatgataatcaggtctgaagcttcttgtcttgacatttttgaaacattgtgtactactttccacgtggaagctagctagcaggtttctgattatgtaaaactttttgcaggatgtggaggagctcatgagtttggctccagaaaaggtcttgttgaaatggatgaacttccagctgaagaaatcaggatatacaaaggaggtgacaaatttttcaactgatttgaaggtaagctcttcaatgaccctgaaaatgaaacttccagttgacaaaacttagagcatctgtttcattggctattcctgcttctcaatgagtagtttttttagtgcaccgtaatatggtgtaatctagcattctagattctagaacttacggagatcgagaaataaaaaatttgcgaactgtgcatctgagaaactattttgcaggctatccatgcaactttgactttgatgaatctgttttcttatgggaggtagattttgatgcacgggcagcttattccttgaggagggaattgcttatatttctttaaactataattgcatggatacatatgtccttgtattggactttgacaatcttgagatttggacaaatgaccgggggttgagtgggatacagggccgacttttgagatgctccttccagtgtaaatagtctgtttcatatgccaaattgttaggaatgctgcaagcctgcaactattattgtagtagctacatatagtctgctttttacaaggtgaaacagcataattgaacttctcttggcttagtatggaatggacaaactctatcatgttgctaaggttactgtatgcaattcagtatattatttatggcaatgggaagttctgcggaggcactcgtggaaattatattgcaacataaccgaggtttaaattttagctaaactatttcatgatatatattaggcaattcctctggtttcttatatccagctgcttatagtaatagaatttagtaagcttttgagtttggtacctggaatgaaagagcttaccagcagttgtagttagaaggtcatgttcatcaaattcctttctgtcctgcctgcggtggaagccttgttacaggcactgagtaatggtatcatgtggattaagaatttaagattgaaaggactattcttccccgaagcctgtaaattgtagtaggagttaagaagtggatcttgagaagagttaaatttttcctgggtggaaatgactctggaagcattcttatgcatcatcacttcatctgaaatgaaccatctcggaggtatagatgcttctggtggaatccagatttcaaatgttgtgcaattgatctgttatactaccttcttaaaatatttgccagcctaaactcaaagttcgatatatgcagtttccttggacattcaaaaatgatttatagatctattggatgcaaattgggcttcatttgaaattcataggtctgttgaacaggtggatccatcagatattttaggaatttagtaagcattttggatccttgtcatggcttagctgctgtatttactttaagcatcatggtgctttgtttaggctaccaagcatagagggagaaggcgaccttttgtaggtttccatggttctatgctttcttgtatggagtaggtctcaaagagaacaacaggtgaggcggtataaacggagacaaaaagaatttgaccatcctaaaggaggattgatcactgtaacatgcttctggaataattaagtcctgatttccatctgtgcaatgatgcacgtcagagacttccttttctatttgttgggatgaaagaagatgtttgagtgaagtatggtaattggtaaggatacaattccttgaaatggatcaaagggctagaaattctagttccattgaatgtcagtaacagaaccccctttctctgcaaagacaaaagttaaaatgagaagactctagtgttcttggatcagattcccatcggaatgaacttattcgactcatattttcttgtccttatctttcccgtggtggaaacaaaagttcctatgtaagctggtactgaagaaacaaatgtaaaactttgtctgcactttgtagaccccaggaaacatccaaagagagagccttaactgttaatagtcattcttatggatccgacctgaagcaaaagtgttgatgcatcaccaagagattgaaatataaatagctttttttatcattattatttcctttttttgttatggagatgtaacacaaacacttaaggagattctttaagctggacttcttagaacaaagcaaattatgagttgactttaatcaaaccaattgtctagataaaggctttcatcttattaggaacattgcaagtcctacgatcttgaagacattattagtgcttatctgaaatcgtgaacccctaacatgagttaagaaagtctgttcatcagcctctagaaatgccttcgtgtagactgcttaaatactatcccatccaagcttcctcgtactaacaaatggaataaataatttttacttgtcttttaagcaactttgtttccaaatttaggtattgtttctggtcctttgagctaatattataccaaatcaatttagtaagtagactcctctttttcttcatcgattctcactgaattggagttatttctactgattcaaaccgaaagttatttttgcaaatcttaagtgttaacacatgcaattactgattaaaactgaaattttctgataagaattttgtactaatgaagctgatttttggtgagtcaaatttttataagttgaacagaagatggccctgtttggttaagtgaagaatttgtttggcttatactttctcaagcccaaacttctaggagcttttttatatgacagacaagaaagtgcagaatttcactgtaattgagattccatataacagcctctatcagatgaggagttgttagttgaaattacacaatcaaagatatgtgctttggttgtatagctctgtatgttaggtgattacaagtcaagttcagcaacagctgtaattattgtgttctacaatacaaaacaatctaatcgatcgaatgatatgctacatttccaggatggtgaagcttacgctcatttacttaacgtacttgcacctgaacacagtaccacctcaacattggaaacaaaagatcctactcaacgagcaaaattgattgtggagcaagcagagaaattggattgcaagaaatatattagtccaaaggatattgtcgagggatcaacaaatctgaatcttacatttgttgctcagattttccagcacaggtaattctttttttccactttccctttgtatgtttcagattatcaccaccttgaatgaaaaagttcaaaagttttataggggagactatgttactgctaaagcttagacttactttcctgccaatgtcaccagcatatttacttctatatgaaaataacatttgccatcatcaagctttaagctgttcaaatcaggtcttggttatttcattattcatagttattcatagtaaggtaaattgaaatttatctctcatttctattttacattctttccttttttacaactgtttgcaaaaactatgttgtatgtacgtatccccatgagaacttggtagcctcaaattttcattttttcggaaacttaatttgaattgcctatagatcttttctttactttctcacttcaaaccgttgcggaggaaatcagctttgaggtggccatggtggttgatgtgatatctgagctgttatatcagcactatatgtatcttttttatttttgagtgtttttagggagggaaggagagaggttgcgttacaccttcatttgtatttggaaaaggaacaccttatgtctttatcatctacgcaagagcatattatatatgttgccacatggcacgtgttataagttttattttttttgattgtacgacactcagcatcaatgcaggacttacatgtaaacatgtcttgacgaactttccatactgaatgttgcaaatttggtcagaaaatcttttttcttcgtagttatggggttgatgatggtgttgtgttgatcccctttctctagtgtagggcatgtgttatttttgcttctgtaattattgaaatattcacaaggtttcaactttgctgtgcagaaacggtctgactgctgaggttgatactgagaagatatccctaacgaatgttttagatgatgacactgaaacttcaagggaagagagatgcttccggctttggattaatagtctaggagtttcaacatatgtcaataatttgtttgaggatgttagaccagggtgggaatcttgtctcatgctgtcatatctagaatgtttatgaagtttgattaggctaatttgcagtcctccttcgcaggtgggttcttttggaagtgctggataaagtttctccaggatcagttaactggaagcacaccagcaaacctcctatcaagatgcctttcaagaaggttgaaaattgcaatcaagtcattgatattggaaaaaacttgaacttgtccctagtgaacgttgctggaaatgatattgtacaagggaataagaaattaattataggttagcttttcttcgccattttctccatacctctttggttatactatggatcctgagagccttattttcagaatatttcagacatgctgtcaaaattgtgctggtgcatgtgtttctaaggcattagtatatagaagtatattattgatcattgatatttcatgagccctagcggttgtgtgccatggcattttgctgagcttaattatccataaaaccatgtcatgccccagtataatgccttaatatgtatgtttggatatttgttgttttcctgcttttcttagcttaatctgaaatacatctaacctatttcaaatatggtctctctcagcctttctctggcagttgatgaggtttacaatgctccaactgttgaaaaatttgagatctttttcacatggaagggagattacagatgcacatattcttgattgggcaaacaaaaaggtcaagagttcaggaaaatcttctcaaatggacagcttcaaggtatgtactactctgggttctgtaaccatccatatctgcaatcttttggtagctatatcaattaaaagttgcttgatttatgactgagcagagtcgatcttttacaattgagtctgatttcatttcaggataaaagtctatcgagtgggatatttttcctggaacttcttagttcagtggagccaagagtggttgattggacagttgtaaccaaaggcgaaaatggtacatcgtcactgtgttgaatatgcaactaaaatatctattttctatcattgcttcaaagaccaccccctttcaattctttatggaaaaattgtcaccataaatcccatgtttgggatgtcttctgaataagattaggaattttgaccccaaaaaaaaagcaatattgaacttgtgtaacaagttttcactggggaccaaaagcgagaagggtagcgccaaacttgatagataaatcaagtttgggattaatatagagaaacactccaaacttgggatttatagtgaccactttccataatttaatttatttacaattaattctaaaaagaaagaacatctgaaatgttttccctttcacctaggatgttcagtgtccctattaaaaaatgaaatccatgtttttgtttgcatcttgcaatagcagaagggacagaaaattgaatgctattgataatctttatgtgaccacagatgaggataagaagctgaatgcatcttacataatcagtgttgctagaaaacttggatgttctatattcttgttgccggaggacattttagaggtaagaaattgtaatccttcaattaatcgttgtgatgctttgctcctttccatttttcaacctgctggctgtagacgttagttctgttattgtttgcttctgtcattgtttctctgtatagttggtctttcattaggttcagatttaacaatattgtatgctttcttttgacaggtaaatcagaagatggtacttaccttaacagcaagcatcatgtactggagccttcagaaaaaacccgggcagttggccgttcttgaagaaactgatcctgccgaagcatccgaaccccaagaagaggaccagccggaagaggaatgattttttagtggaacaaatgttttttgagtttgctttatttttttgtgttcaattttcttggccataccaacaggaagtacttaaaacaaaagaaagaaataggattaacaaaagaaagagtcgaaacgtaaaaaaaaatgcaaattttgtttagttacttgttttcacatgtaaattcacttaaatagttaagatgtatacatgttggcacaattcatttattggtgataagcgcaaagtaagtttgtttgggttgtatatatggagcatcgaaagagcttctttttcttcattattgaaaaaacttgagcttggaaaagctggtagttttactgcttcaatagatatctagaagtggtggtggagcacaaaagtacccaagacaaatgagtatatcacacaagctactattgttatacttatatttcctatataatttcgttcgtattacaaaaaaaaaagggaaaaggatgaaacaaattgactaagagcatggccacagaatttgggctcaactaaatagtgtacatcaaagcatataggtattcattttccacaagtgtaaaagctagaacctattcacttagaagtggaaaccattccataagcgtagtttccaaagcgtgggattaactgcctcttatacattgtggaaaaaggaatgatatcagtatgtagcacaagatacagaggcccaaattcaggcactcatgagtcatgacttaaatcacaccgcatctgatgatagcaccttggaccatcactcagatgaaatttggcttactgtgacaacagtattgcacttctatgtattcacaatatagcttgttaaattctctattaaaccatcatagagcatttcatagttccattaattgaattcgacatctctttctcttgttcttgttcggcgatgtgcattagcatctccagccgcttgtcaaaaagtaaggcactctcatctctcttatccaactcagcagcctcaatctcgagccacttctcccgcaaatcatcaagaatgttcccctggtcatgaattcctcctcctccaggggcactaggggcagtagtacggagggacgagtctcctgatggtggtggaagcgtcaaaagcatcgctcggaattcttgtgtgtcggcaaatgtctcaaagttgcaagccatcgcatcgagactgtactccctaattttcaggacaccatacctacataagcagccaagttatcatgaaaattaaaagaaatatatacataatgtaaaaaagagcaaagatcaaaattacaaattaaaaagcttatgtagcaagcaaaactaatgtgaactagcagatttctctaaactttcagctactgaaacagagagattttgtcctgacatcccttcttggttacctatggctatgagtcaatgactagcatttctttctcccaaaacgatggaagaccacaaacaagaagaaaatgacttagcagtgtcgcaatatgatgcaagagcaatagagataatatcgctactagctaaaagatcaagaatatcctaacagcaactgtactataaggtacacggagatcataaaagtggctctcaggaaactcatgtccaggttccatccagcgtccatggtaaataatatacaccacaaagttaacctatgattgaactgcaaaacagcacaagaaacaaatatgttgcaaaaaattacaaggaaaaacagaagttatatattgagtggactaccaattatgaataaacatcaattttcttcaagcaaaattgcaaaagttctcaatctctgattcttacgttcaccaaggcattccgaaactagattgacttttcacttttttgaaaatttataagttaaaaaccctccaaaaagtgttgggtctggataaagatacttaacaattcaaggaaccaagattccacaagccacagatatatatgcgttaagccttttcctttttgataagggaaaggaaagcttcagttagtacgtgtcagcagagtatacatataaataaagcaacctagacaccaagtagcatgaatgtcaccaaaaaaatcccttctacacctgattgtatagtttgccttgctgtatctatgtcaaacatgcatcaaatcaatgggcatttgcaaaattatccttcaaaactatagggaaacaagaataagatccatcacaggtgcttctaacatgtctcagaatactttgaaaggctcctaatgacaaaagtatgaatatttccgaatgacaaaagaatgaatatatcatacttcttcctcactccatatatattttatcattgcctcttcaataacatggttgccagacatttgaacagatagttacacttcaacccgaacatacaatttatgctgctttatccgatggaacattagagatgcatgactgtctagtctgaatgttcaacctaggtcctagtatctgaactggacggcaaaactacaatattttgagtaaatatcataagtatctcccaatcacatactactttatccaatttagcatgacagacagaaaatcgcgaaaagaaataggcatacaacttcacttgcatctgctataccctgtaaaaattaaatacataaacaattaagaacttacatatctgctaatagcagccagtggcataattctgaaggtgaggccatttctaggtgcgggagtagtgcatcagctacagcacgcttcaggggaaataacaaatatctcgaagcagcatcaaataactcctcagcctaatacggagaaatagcatttcttgagcagagagaaggaagaagtatatactcattacagtaataagaagctcacctgttgaggatccacatctttcaaaacatcagtgtaccttcaaccaaaaaattaattacaaagttagcacatgccaaagagacaaagaggataattatcagaccatgtgtatgtgagaagacgtagatttagcagtccaaattttggtagagaaaaaaggaactctaaagtagcagcatatgaatcctctccgaataaaggggatagcagcatatatatagtgcaccataaaacatgtaataagtattatgcaatatgcaacactctttaataaatttttcttgagttcgacaagctatgcaccaccattgatactcataaattacatttgctacagaatgctgatacgacagggggggaaatacatacatgtattctatcattttctcaaatgcctcatggctcaaatcatgctcttcaagatagggaagagcatgaccaagcacgttatcgttcacctccagaaaatcatccatccgggaaattcttgttctgaaatagtctgatctggaagccaagacaacttgatggcagcggaaaacccacccatcaactccaacacatatatcagcaagatcattcgcatgttcatggatctgtaatctaccaacagaagctactaaatttagggcaacattatctacgtcctgttttgtagaggaattgttcaaggaaagctgaagaatatgatgtaaagcagcaggaagacggtcttcctcaggaagggacaagccctgcaatacaaaacgcctttgcgagctgtctatttcttgcaaagctttgtattctgtgaacttctggtgagctagttctttctcaatcaccctccgcatttcttcacattcacaaactttgcaaattctgactaaatcctccatgtcatctactgcaacctctagccggtcagaataaaagaagtgcaagaggctgtagagagcaggataagataatttctcctttgaaaatcttacttctcttcgatacttccaatcattctcaaacttcctcttaaaatatggcgaccgagcacttaaaattactctatgagcttctatgggcctaccgtgcacataaaatacaacatctggggagaagtagttctgattgggtccatccagcttcgacgagcctacagaacacaagagataaactagtgtaaggcttcacaggtatataagttggatggcatacagaaatcatgaaggagtaatggctgaacacttcaggaagcattcagacaggaaggacacaagaagacagaatggcattttcaatttttcattcatgaccatggtacgaaaatacggctgaatcagttccattcgcccatattggaacaattttcaactttggcaaaccgaatttgaccgtttcaaactagtggatttaaataagctggaattttggccaaaccaaccatgacaaggaaatttcgcccacataacctgaatttcccgtattaagacaatactttccaaattttctttttcccgccgctccctacatcttcctctaataatgacataaaacaacctaaaatgatatagatcgagagaagaagaggcaagcaaacgacaaacacaagatctatggtgaatggtggatttaaggggaaaaataaatgctatatgagctaattttatggtatacagtgcaaataacagtatgataaaccgtgatgcaatccatgtcgaaacatttttgttcccaactattgccacgaaaccgcaagcgtttttacgattgtgaccaaaaccttatcttcaaaccaagttcatgacaataaagaatctagacgcctatcaaagaagttggtccataacccaagtaatagatgcatttaataaaagtgtgagagtatgttctcttcaccccatgcataggacctcagttagaatctttcctttatttctatttacgatgtttatctttatgctctctagaattctttattatgttttctagaaccttaaggcatgtttgttgggtactttgtgcaagttgacctttgggcatgacctggtgctagtttagacaaattattacgtttccgttgattcagtgttcaccactatgtattatttaagcctgttgtggggtaatgaatagtgaaaccaattattataatcgttattagctgctttatatgaatagttgtttacccaacatagaaaatgtgttgtctttcgcctttcaactcccacctcaggcttgtcactttttgtaaagtcctgctttccccaactcagttcccgcttgtgcctgatagctctcagtaagcacgcccaagcacggactgtcgcctgacttcgtcaataggcaagtatccctgttttcaattttgaagtccctttattcgagcactagccctgttccccatctggcttgcccccttgtcgccagaaggcaagagtgacgccacaccatgagggtgaaaaatactcggaccaacacactgcataaggaatgtggcaaagtatctttacttatccatagtacaggggaacataaagccacttcaccctccctccgttcaagtaccctgcatcccccccccccccgccccgttgggtactgggtgtggagatggtaattggaagatgaagaagaacgaaggaagtggtgtgagattcattgcgtagtcggaacgtgaaggagtgtgtgtgtgttgttgtgcgagtggtagcaagcagcccgtaggtttcaagctcatcaaaacccccccagcaggtttgggggagccaaagagctcgagtcatctgccagcctgcagcttcacaacctccgcccaaaggtttccgcacctcgctcccgcgtgtagcagctaggccaagttcgtgggcttggcttgcttagttttacttcttctattaggtttcctatttctctcattaacatataaataggttttggagtttatttctacatattactctaagatagtgtgaagagagagattattcttcaatctagagaacctagatagaagttagagagtctagagattaaagacttctccttgtatcatcatctcatattaaaagtcttagtgcagtgttcgtggtttttctccttattcaaagggtttccacgttaaatctttatgcgttctttattgctttgtttcttaattcctctgaatattatactttattgtttcatttgttagcgcctacaatacatattcctcacatccccccaccgggcccctctccttccccaattgaaaaaataaaatacatacccagagtgacttttaaaaattactactgaaagctcttgtagccacctctaaataacaatagtatctaagagctagtttaattcaacattatttagctctaataaacggaatcaaatacctattccctttcttcttgtttggttcaacttctccccaatgcattaccattacttggtggtaataagttcccctaatttgttacttccccttccccattagcaaaatccaaatgttagtgataatggttttctttttgttaccatttcagtactctatctgattacatttcctttacattccatgacctagaaccaaacatgctctaatactaacatattacagcatagaaacatcattcctcaagaagaagacacgttgattattgatataccacagttcaattccaagattgtcaattcaacttgatcataattataggccttaaaaaaacccaggtccaatcatgtgtaagcataaagtaacaaaggaaaataagggtgatcaggttcaatcggggctaataagttctcaaaagatggttacacactacagtttaaaaacattagaattcagaaacaacaaaggcagctcaccaggcaagggaaggtgatcatcagtgaagtcgaaaagcgggcgattaggcacacaggcaaggaaagtgtcccttaaagcagcctgaagcggcggcagaggcggaggacgagcctcgaaagctttaagaagcttcctgaccttaaaattaagggcagcatagtgacaacgatcaccatcaaaggtatgctcatcacaaatggcgccattaagaagaagcataagagcagcatcaagatgaccagctaaacaagcatagtaaagagcaacagaatcccacttgtctctagcattgacattgacaccggattcaaggaggtatccaaggcggtccacgtctccggctcgtgccgcctcgaaaacatcgccatgtgggaccttctttgttggcagggacgatgtaaggtcttccacctctaggaatatgtctgacagatcggccatttttaattttggattttggatttagggtttttggtgggggttttgtggagaaggatgaaagagattttggtggcaaattgcaaatgtggtggggggttttgctggggttgaatggcggttggttgtatgattttatagttgcagacacttgcagtggaaagagaaagaggaaaagggtaggatttttttgtcattatatgaaatggatatggtcctagatggggtagtgggcaggggtgttcatttcgtattattcgatttgatctataatttcgaatagatcatttattgtcgactcgttgagaataattcttacaatgacctattaaaagtagaatgcgtttcggtgggatccctatgaatagaaaaaattatcgtcaaaatgatcgaatgacaactaaagaatcctttagatatgatgcaaaatgggtcttgttctatacttgatcatagttttatgtatgagttatacgaatcggaatcggaagaaggggaaggagcccttgatgtataacagatataggaggattgattcaatcacatagtttaagttcctaagagaaaatgtgatatgaatccagtagaaaaaaattagaatttgaaatatacaaaatttaggattgaatatccgaattattttttttatttgtcattctatgtgaaaccaaattttagggtgcgaagaagaagggtggtgcactggtggcgagggaagagcaggggtggtgcactgatggcgtgcaaagagcaagggtggtgcactgatggcgtgcaaagaggaagggtggcgcccaaaaaggaagggcaaaggttggtgtttggtgggaagggatggcgcgcgaagaggggggtttggtgttgataggctagggttggcggctggggagtgcgaaaaggaagggtgaaggttggctgctgtgggacacacacaaaaaaagaatactagtggaaaaaatgaagaagggctgcgctttttgacagcagccctttcaatagcagcccttcacattttaagtagggcgcagcccttcatggctagaagggctgcgcttttacctaaaaagcgcaacccttcctaccaaaaaaaaaattaaaaatttttttttttttgacattttctgaaattatacagaagagaaacgaaacgaaaataaacccaaaacaaaaaaaaagaacgaaacgaaaatgaaaaaaaggaacaaaaactaatacacagaagttatagatctgaaaatacaagaacattaatcaaaacaaagagaagtatacaagaacattaaatcaaaacaaagagaagtatacaagaacattaatcaaaacaaagagaagtatacaagacctatagatctgaaaatacaagaactacctccaaacattaacctaataatgtttaaatacataaaacaaaaccctaatacataattaaggaaaaaaaattcggaaaaacttaaaatggctatctggatgcttaaacgaactcggatggctgagtttgactcgttggctcgttccgcttccgaaaaggtatcacaataggcaatcggactccgtcggcatgattcgtgcaaatcatttcagcgtttttgtcgcaacgtttctgggagtttttgagaggatgagagagaaggaggagagggaggagggacgtgagagaatgaaggaggaaaaggaataatgaggaacgtgagagaggagagagaagaatgagggatatatttgacgaatcccgcttaatatttgaagcccgcgaacttttttatttcaaatttttttaggaagggctgcgctttttttaaaaagcgcaacctacatggctacatagcagaagggctgcgctttaaggaaaagcgcaacccttcctgcgcagccctttctgttttttcccctagtggaaggacaaatgctcgtgggcttgggttggctgttgaggcacgtgaagaggaagggtgaaggctggtgggctcatagctggtggtatggtggcctgtgaaccatgataaggttgcaggctatgttgtctgcatgagagaatgagagtttaggatacaaaaaaattctattttttgttaaataaagaaagaagaaagttagcatattaagaaggttcggatatttccaatatttaaaatgaaaaattttacaatttggattcgatttgatttttttcggatacccaatctccgaaaaatcagaaacctccaaatccagatgaaaaatcctaatttttcgaattggtttttttttaacaaccctagccacgacatatgagaacttatcctccaaacctccaacaatgggtaactactaactaagtcacatgcaaaaatagaacagtgagaaaaaaagatgagagagaaaaaagtagagagagaaagaaaaagaaaggagaaaaaagcctcaattccaagtcccaaatccctagccatcaaaaaaatcccaattcaattttgagaaatcttctatcatccagcatgataaattgctcttagttattgtttttaacctcctgttatcaactctaattgcaaagttcaatcttctgtgctaaaaaaaagtcattattcagtccaaaaaaattcctcagtgtgaggttgtttcttctcgaaaaaaaaaatcagtttatgaaacttatgcccatcttttattgttagtgcaattaagagcttcctcatcatatttgggattcagagttcaatcatttgattggattaaaggattcatcttccttccattcaaattcaaagttcgattttttttctgatctttacatgaaacgaaagttagtttagctaaataaattaaagaaaacacctatctttcataggtcactaggaagccacgttgtacctagttttagtaacttgttaaggtttttgtttaattaatactccctttatttctatttaatagttacattttatttttttacgcttgtcattgtaaatatttaaatattaaaatctctaaagtgaaatggtaaaagtcataaaaggttgatattgcaaaagtacataaggagatgaattaaacaagatcttcacatgactatatttcattatttcttagtcattaatcacaaataatagtcaaacatataataaattcataaatagtgtcaaaatttaaagtctaacaagtaaaaaaaaacggcgggatatgaataaatataacgtattagaccgtaatatatataaagaatatgtcaatatgtgtatggataacttattcttcaatttgcggatcatgtaaatttacaaatacttttcagaaaaaaatgtaattttactaataatttgaacatttaaatcgtatattaatatatatatattaatgtaaattttctcgatgtcaaaaaaaaatatttaattgaaaaatccttgttatgtattactcgatttataaaccatcttttcatttattagaccaactatagttctaacaattagtgacacatgttaatggtatggccacctaacttaacatctagcaaaacatatgtgagatgcataacacttgtcaattaaagcaacacaacatgcatggattatatgtacaaaactaaagcaattctccttgagtggtgcaatcactttacaaaatattttttttttttggtgaaataagaggggaaaccccatacagcacgaggctaagaaagcagaaaactacaagctagaaagaacaacaaaacaaaagcaacaaaagcacaacaaaaaccagttcacaacaaaaataaagaaaacaaacacaccaaacaaccccacccaccctattaaggggggcgtccatctaagccaccttccctcaagcacgggatccatctcggcctcgctacgccccctaggtcctccaataaaacagcatgaaggtcattcgggaccgcctctaacaggacaaacttctcttgcaaagtcaccccaaaattcgcgagccaatctgcagcacgattcgcttcacgaaaacaatgcgtgactttaacttcccaatccgtacgggaaatcaaggccatacattttcggataagatgaatataaggagagctagatggaagctcaccatctagcaaacgaaccacaacttcagaatcaacttccacatggacctttctatgaccacctctccaagccaccaccaaaccacggagaacagctaaaagttctgctctcgtgcacgagcagctcccacaattcagtgcaaatacttcaaatagttcccctctatgtcccctaattaaaccaccagctcccgcaggtcccgggttccctttggatgctccatctgtatttagctttacccaccccacgccgagatgataccacctaatatacctttcgcacctatctggacgttgactgctatggggatcttcatgtctcttcatagctagatcaatttgtctcacgcgagcagataagaagctgatttggtccacgggtattcgaggagtagattgaaaactcctatcatttctccacttccatagccaccaacaagtgactgaaaacattctactccacgattcctcattatccattaatttacctcgaaggttcaaagttaaccactcctttaactgccctttccattgtatttcttcagtgagaacacccaactgacgccaaatcagtcgtgcaaccggacagtcccgaaggatgtgtattgtactttcttcaacttccccgcaagcaaaacatataggatcatccgtgagctttctaatgaacctatttccattcgacatgatacggtcttggtaactaagccacataacgaatctgattctttgatcactttacaaaatatgagtatatgaggtaattaatcctcaacagtagcttccacgacaaactaaagttcaattattctcatcacaaagtaaacgaagatacgtatttactgttccttgtttggaattacaaaaaccagacaattaagcgtagtacaaccactactatttgcttaaagatatgcattaaaacgtgcattgaattattcttcaaagttacggatggcattccacgccccgcaacgtggctgggctgcggcagtgggctgggctccctgcgctggcccaacggaagctgaagataacataaggcgtctggtgggtcaaacgagcttcaaatgggctcaaattctggggtccgtcatattttgggccaatgaagataatggtcgagccagattttcagtttaaggcccaaaaccaggtcatggtgcacgggtattctcgatggtaccgaaagcttctagaaggggattgaactttgacaaggcttgacgacttgggattatatattcatgtcaagactaggataggaattagcatttaagaaaaatcttcaaacatctcccagcaaggcattgaacctccacaattgtaggattggtgagaagtagtgcttgcttcataactccatgtcttgtagtgcttgcttgctcctttagtatgaggagtagtctatccattaaatttgctccctcaccccacatcttggccccacgatgaaacttctcaattgttactatgattggattaacttgaacaagatccatgatatagaaacgtataaaagtgcacaaacaattagcttcaagcttgcactgtagctatcaaaggttgcaacggtatgttcctcagtcaactcctctattaccccatgttcttctccaatctctttctctaccaaagcgtggtaggagttggttaaattgaccaaggtctttaattagccagtaccaaagatggttttgcggcacatctctaaacatatgcatcccatcatccaatttgtgcactataaaagacaataatggcaatggttgataatcatttgccattatgaaatatgcaacaagtctagatgttcaagtggcatcatttcgttgtcgaggctcctcttccatcatagaggtgagaatcgtcataccttcaacaaaattttctatcttaatccctatttctcttgattcaatccatgggaggagaacgttctttggaaccctcaagattgaatctagggatggtccttactacacctctagtggctactctaattctctcactatacttggagcctagtaagtacaacaatccatataatatcccattatgttggttaggatataaatggttccagaacattcccaaattgcccttatcgaaaagcatggacagttattctaccgcaatatccacaatatccaagtaagagtgctcatgatcttcagctagtatgtaaagggataagcagaggaaacatctttcggcattcattttctttggaatatgcaattggtgcactatgttatcaactgtaaacaatcaacaataacttaatttggaaatcatcatacgaggtttttttttttgacgtgcatcatgcgaggttaaatgtatatatgttcctaataacttcattcaacaagcttatcaagtgtaaatattcgaaattcaggaaatatataaatatataatccaaaatgtataaagaacttggtcttattacctacccttacatatatatttatatatgatgttagttaatatttatctacactgtgtttaattttagctcaagtaactcaaactagacaaacaaaactcaaataaattcagttatcacagatagatttcaatgaatactatgaaataatgtaaatagattttcatcaagctgattgatctttctgattagttagcatacttgtgaagaattaatgatcaattacttcaaacttctacagaacctctgatgcacaacaagagaattacaattgatgagttccttatgatgttttatttgaaaaatatatgaaaaatttcgaacgaatccccaatgttttcgaaaatctgaaattgaaaattttcggtccgtttctggaccaaaatatctaaaaactaaaatatcggatcggatcgaccgagacatggaacggattggctggatcagatatttatgaacaccctaagtcgtgacattttccccactaaaactcttgacgttttcgtcaaaaacgtctttcgaattctgcagtcttgtcccactaaaactcttgaacatttttatggtatatcattattcacatgcatatctataagaaaacacatctttagataattcaagtttcagcctcgggtagagatggatctggacagggtcttctaagatctagatctagatccgttttttacgcaaggatccaaatcctacccggatccattgggtaataagaaagaggatatggatcatacggatccaaaacggatccatgcctattttcttcaaactacccaataaaataatctaatatcaaccaaaatttacatttaatttctaaaaaaaccattgctaccatttacaactatttaattatcaaactatagattaatcaactatttttgaaagattaacaattatcaattgatttttcgaaaccaattatccaataaattacattcattagaacaataattcgaaatttaagcaaaaatatactattatacgtaataactaatattataatattaaataataataatattgtaaaaacgagtaaacgaatctggataataattcgggacccggtccagatccgtttttaaaggaagatccatatcctacccggatccatagggtccaaaatttaaggatccagatccattacccattgccatctctagctcgggtaaccaactggttaaaatataaaaataaactagagttgtatcacatttaaaaaattatctttaaggtcttaaattgcaataaaaaaaacaaggaaaatttcctcaagtacccttgaggtttgacgtaattctcaaattagttagtttttctctttctctcttccattttctctatctcccccaatcctccattaatgaacctttaagcttcaaatctttctctctcctcctaattttcctctttatcttctgtgtcctcttacctccaatcttcataatgggtctgacccgacccgttagtcaacacccttgacacaactcgttagtcaacacccttgaattgacccggcccgaccctgaccctgtccggcccggccctgaccctgaccgacccgaccctgaccctgcccaatgaacaagagtttaagtgagaagatataaattaagttatagttttgcgaaaacactatcctaaatccctaataataagattcatgacttatcttttaatttttcgaaaaagcaaaaaataatcaaaatggagtagtggaatcatggactagaattatgcaagtacccctcaaaaaaaaaaaaaaaaaaaaaaaaaagtaatgccaaaatcgcacggccaaaaacggtttgtattccaaaagttcgtactacacactctacaaacgtttctgacagagcctactactgcaactcctcccacttcctccatctttcctccatctttggaaacttttatctctctccttcacttctcaacttcattctaggttttcactcattattttctccacagtattgctgcaatctcagtaacattttccttcctaaatcatgatattttttttttatattttccgtatagttaatgctgtaaggccattaattgctcttgcttgcttcttcgtgaattatctgcaattttatctacttcttatttttcgttatttttgtatttttcagttcgtttctcatctatctttatctttgtgtttttagtttttttttttaattatgtgcagagtaatttaatctctgttttttctttgctatttgaatttttgtttatcatctagttttggtttgttgtttggattaaaatgcttaattgaacttttgaaggatttttttgacaaattttccttttttttatcatgtaattttttccatctctgttttctctcgccatccttatttggaggaatttcttcttttttagtttttttctgttctagttcatttgactttaaatctcgtagtttattgtaggtaaattctaagtattatgttctggtgattgtcatagtatgagggtttcatcgagaatgttcagcatactattctgtttgcttaattagttccttactattattgatctctcatttcgccttaagtatataaatttttagaatcaatgatgttggcttgttcttataggaatttttttttggctaagtgggaaagcaacaattttcggtttatcattaggtttccgaaatcacgtaataatgttgctatttatcaatgtaaaagggaatttgcgtgcctctactatcacaagtcacagttttcttcttccattaggatgctactcccttagtgtataactttttccttgtgtgtcttttggaaattatctttctattggtgtagaaaggttagagctaaactcaactgtttttttattcatttttgataatgttaacaagtagactctttccagaccaattgtttccgtgtatatgtttacatgtaaattctaacatacaactgaaatttatggcttaagactctcttgtatcaaaatttgatgcttgactcttgttggctctttacactagtgtttgctggattctcatttggctttagctacctgtttgtgtgtttttctttcttatggcattatggctggtgtatgttactcaagattagcttggtatatgacatagagctgatttcataacaatttttgactttgcagccatctgcggaagtaaatggcatcttcagatgaagagggtgaggtatatccagatagcgtgactgattatgaattcgtcaatcaggagaatgaacacatttcatttgcatttttgccccttcaatggcgcaatgacgagtctattgacactgtaaacctccagatgtttatatctggtgtttgtgatggtggccttcaaaagatctataaacaagtcgtagcatggagatatgagcttgcgtatgtacagccggaaatttcggtgttgtgcaagggtaacctctgggtaaagcttttgaagccgaaaaagctgtttgaggctacaattaggtcaatactgatcacgatacaatgccttcatttcgttaaacataatccacaggcaactaaaaactctatatggtgccacttatcaagagttttcaggtttgaatgttgtctttggtattactatctggttttgcaatatgtattgatcataacattacataatgtatccactatcaattatctcactatcaattatcccactatcaattatcatgtactttgaataaattatatctacctgcaattattgcagcatatatgaggtttccccttcagaatttgactgtatggatcatatatcactgattaaaagtgctgctaaacgtgacaaaaccttcatgaataacgaggtatttgctctttaaatcctacttctcctgagatgacttgaattgcttgcatgttcatcattagtatacctaagaaattgattgtattcatattacttaagccatagattgcactcggctgagatggactgcgtttaggttgtttgatctgttctcatctataatactcttaggctttacactttgatgtgtagtcaacatgaattattattggagcttaatctttgaggattttgagctgataagaaatttatattcttgtgctgtttatgtaggattcaatagtgtgcttagacatgtatgcataaagtagatggacatgcttatgctacttgtgtcttgctagcttgccatacaaagagggtagacttgatgtacaataaagaaattttttcttcaaattatttaccaaataaccccgagttttcggtttgttcaccaaataccccgaatgttttgaaaattcatcatgtaccctgatctttcaaaagtacactcgcataactaatgattgtcaactccgttaacaataacacctaattagccaaatgaacccacttataagaaactaagtgcccaatccttttctgcaaactctactaagaataagaataatcactattgcctagcaatttaaaggaatttaacagtacatatgtaaacatgagtaacttagtcgacacttttgtcatatgtgtagattggattattcatgatagatgcgcgttgttcttgaagaatttgatagtattgtgtgctctctttgttcccaaattttctctactaagagtattcataagaagtagaataaaagatttggaagtgaataaagagaaaagaagtaagagaaactgttggtatggagagagaaatctctattatatatgggagctcttgaggactttcgtgtctatccttttttaccaatatgccctcaactagaaaataaaatcacaacacctactactctattagtttaaaaacaaaaacaaagaagggaaaaattgtcaaacaaactgcaaagcaactactccctctatctcagaatactcttggcacttatcaagacacgtagatttagatgataagttgttgtttggttatcaattgttattttattgaaaattagatgtgataggagttagtaattagtaaaagtagtattactctattttaaggagagagaatgtgagccatggttaaagttggtaggtaataagagtggtattattttatttggaggagagggagtgtgggtcaaaagttaaaaagtagaatgattaaaataatagtgggtcatatctcagaatagaagtataaagagtattatgaaacaaataaaaaaaggaaagtgtaaagagtattatgagatggagggagtagtacttatccttcgactttataacgtgcatataaggctagtaggatgtaatgtaacggagggataagaatgaactttttttaatcaggttgttttcttcaacctatagtagaagtgaacaaaacccttagacaactcgaaaaggaaagtgtgaagaaaggttagatgaagggagtaattattagatccaactgttgggagttaggactacatgaggggaagcacatttgtttcagtactcttttagtgttctattaattttttctttcgaggatttcatagtttgtgtacttgtgcttatcatgatctctcttgtatgaataagatggcgttataagtttctattcgggctttaggagtcattcatgtcattaggatatttccaaatttcaataatatctgtaacaaatgaatttcataagtggacttaatctcgcctaaagagacaaactatgtatatcttgacatttatgttgtgtgatatgcttttatttctaattgattaatatacatcccgtcctatatatgtgtttataagatagaaattctcttgttttaacaacgaattccttggacagtacattcttgggattctattggaaaagcctacaaaggggaaagtgcttcaaatggtcagttcaggatgttgatttttgattattgttctaatgtagtatgtataatggattaaaattatgatttacctttgtctaccaggaaggttcgatggtgaagagggatgacttcattgtggatgatcctgatgagcttgatgattcatctgacaatgatgacctctttgatacatgttgctcactttgtgacaatgggggggatattctttggtatttacttctcttgcttactccaactttctatttctatatgtttgattgcttaggccgtaagtggatcgagaaaggcccgattagaccaaaaaaagtttggattggatttggaccaaaaatttttattccaaaaaatttcagattggatctaatcttgtgtccaacatttttgtgtacactgatttcacttggtgtcgggaatgctcgacttatcaatttatctgctcatgttgcccatgctggattaattgtatgagcaatgaacctatttgaagtggctcatttcgtaccagagaagccgatgtatgaacaaggactaattttaccccccaacctagctaatatatagtccgtgaaaagaaatagaatcaaacatagaaatagaaattttaattcaagttccaacaagcgataaagaaatgactccaaaaaagttggattgttaagaacttcatattcaaggatacatgtctcctaggttgcatgttctttacatttggaactacattaagatgagagttactccttccgtttttattttttttatttttttatttttttataagaaaagaaaacctaggtctggcaccttggataggaccagcctacaccatccttacggatgatgaaagaaaaggcaatattagaagaggaaaaacaatacacaagcaaagaaacctcatgctagaccgtttctttttaatctacacactttcctttttagtctttaatctacacattgttgctttttctatttttgttaacatatcacttctactttctcctctttttctacccatgtcattcactttttaatattttaatccactcttttgtttctctctctcacttttcaatttctctctccaccttttcggtttctctctcatacttttgtacttcttcattggttttcccccaaagtgaagtgagtaaattaaaaagaaacggagggagtattacttatgtgatgatatgtttttaatttatctctaatacattatttgatttagaaaaatcagttgtaccaaaatggatttaacttttagagaaatggcctaaactggataattaattaatttgaaattttggacaggaccggactgagactaaattggactagactcgtgatgtgttctgactagttatagactcaatttatcgagtccaaaaaactttagactggatttagaccagtccaattcgtcctccttctgattgttgttctgcctctacattttcacataaaagttcagagtgtactaagttaatacaatgttgtttatgacaaattgttactgggttccttatataataatagtgatatttactattataggtgttccaaaaaaatatagctcccttgttcttctagtttattataactggattctccttcatccctcacttgataatgaaatagacacaaattcttctacagtcattataaatcttatatgtttgaagggaggagacataacatgccaatgtttttgtctgacctgtacaagaaacgttaggtgtgcaattgttctcaattcattgagctggtagtgacaagtgagcggaggggtggggtgtcaggtaaccagaagattgtattgtcaaaaatgtaaaggcgtctttttggtagagtaaaactcaatttttggagtgcttctgtttattctacttgctggggaaagctgttttgatcttcactgtttgctttgaactatgtagttctattacacacaaacttgtcattcagttggtcacgccttcctctcctgcctggatgtgcctcatctgaaatgacacaggcaaatcattggggtacttggggtaattgttgaatctagcatgaagatgtatgttcgcctttcaatatctgaccaactgtttactgttttcccatttgatgtcttgcattttgacagttgtgaagggaggtgtatgaggtccttccatgcaactgaggcttctggagagggattgtgtgatagtcttggcctatcggcagcacaagttaatgtaggtaacattctcctacataaggtttatactttatatgtactatgcataacaatttgcatttgtcttgattattgttttttacaggctattccgaattttatctgcaagaactgtcaatatcagcaacatcagtgttttatttgtggaaagttgggctcatcagacatgtcttctagcccagaggtataccctgttaaaaattttacgagatccttttgtcccctctttggtctattgccttgtctttgttttagtatccctttcgtattttttcctttttaccattgagcttttaattgtttcatggttatcctcaactattcattgtacccgagtgctttgtgtaagaagcagcaagactgaataggatttataaagtgttctgccaaaggatatgtggagggtcaaataaacatcatggcacattttttttttaaaagtaatggatgctaccaaagtgttgaaaagttagtctccatgaagaagtaacaatcctagatagtaagattgctagcaagatgcttatgtggaacagattttttttttctcaattataattgataaaactgaagtataattacaagttgcgtgtcttgcacttcaaatttccagtggatcaatcatgtgtctgtcctgctcagttcgtgtaatatccccgcagctgctgtaactttaaaatgccacttgatgaaggctggatagacattagtgctagagtgctcttctggtaggctttcagtctcatgttagagtgcattagcgtataaagaatttagagaatggggatctgaactatgattcttttttttttgaaaaaaatttgtttcgtgcaactttgtgctgtgcagtctagtttatctgacatgacttctttcaggtcttcccttgtgttgctgctaattgtggccggttttatcatcccagatgtgtttccaaaaaactccagcagcaaaatgatacccagatggaggaccttgagaagaaaatatttgctcaagactcttttgtttgtccttctcataaatgttttgtttgtaagcaagcagaggatagagaagttgatgacctacaatttgcagtctgtagacgttgtcctaaatcatatcataggaaatgcttaccaaggtaatcaatcttgaatgattgcttcattgtgtatcaaaattcgaacttaatggatgctagactttcgatcacttctgcagtgaaatttcttttgatgataacgctgaggtgaatggagtcttgcaaagagcttgggatggtcttctgataaagcgtatcttgatatattgcctgtaggttatttatttattgcttttattgcataattttacatctgaactttggttctgatttcatgcgtctgtttggatttgctccggactttgcacagggaccatgagattgatccagaacttggaaccccgcttagaaaccatataaactttcctggtgttttcaaagagaaaaaacatgttccagaaaaacctttgactagagttaatgtcttaccgatgaaaaggaaactgattccttatcattctgcaactgaaactgttgaaaagaggactgtcaaacaagttgataaggtccaaaatagtatcagaggtagtgattcaactaggttagttggacaacgtggtagtaaacctagttctgttgctcagaagagtgaaaggtttagtaatttgtcatttgctttgacgggtcatgtgaaatcttttccaaagcctcatgctttgacgacaatgacagcaattaaagcagttcctgatagtaaagtcaattctgagaaaaatctgaagtcaaatatagtgcactctggcaatgctgacaaatattggaagaaacccagtgctgttcaaacagcaaagcctttggtagagaaacaaaggtgctcaagtcctgtcattgatgtcacaatgcagagaaggtgaggtttagccctaatggtgttactatctacttttggtaccacaaaatatttatgtcatttcttctgcagaataatggctctgatggaaaatgtcaactcttcatttgatgtggacgagttcaagaagcagcatattgttccctccaattataaaaataatcaaaatatagacaagaccctgacaaaggtgaaagttgaggtcacagttaaggtattatgtttatgtctggactttttgaaattgcttgctgcttcaaatgttttaactgtgtcaagaattcaagatatttgctggccttttgactattctctccccccattaattgttgcaaggccattcgaacagccttgcagaagctcgatgatggtggcactgttgatgatgcaaagagtgtctgtagtgcagagatgctccgacagatcccattgtggaaggtttgaactatactactttcttttatatcaataatgcttgtgtacataatgagttaaggactattggccaaaatgccatttccagaaattagaggcgagagctatatgtttttggtatattgtgtaattcaacaatattctgatattattttctatcacgggcaaaagaaaaattcaacagaattactgtcatttgtaactcaaggactggcactggaactcgttgatgctactctattccttcccatttggcaatgttggacaaagtaatgggtaagataggctgctgatatgataattttcgctctgcaggtgaagtggggtaggctgtggatatgataaataagccttgtataggagatcctaaaattaatgttgaagacttttaatcacatgaaaattttgtatattgccctgtcttttgctagaaaaataagtcattcagtccagaactgttgtttaattcaatgggtttaatttacaaggagtaagtattgtaatggctcttaagaagccataaatagtccacttgtatggtttccgtgtatgatggtgggtaattacgggaatggaattctgccctttgttaatgtgagaagtatgtattctgtaggttaaaaagtttgaagttcagatgaatatgtatggggaaacctcccctgcagctgcctaatctattgtcatattcctctgaaatttttgcacaccttgttcctgattattagtttggttgtcctcttactggcttagtggttctgtatatatcttcatcttctaagcaaccgtcggatagagccttatggaattaaatgggctgcttaataccttgtcttcttttcgaataaagtaaagttcttcatgctattgaagcactttaattgattatattgttgcagaaaaggcttgatgtgtatctcgcacccttcttacatggcatgtcctactcatcctatggacggcattttactaaaccagataagcttcaggaggcaagttctgcttggattctattatataatatatcttcttgtttatttttaagaaacagtaggtgaactgattgctaatttaatgcaaaaatcatgaagtgaggaaatgaataatgatgttgaatctgtgctgttatgcatataattttgtatgaatgtgctaaatgaacatacatgatcatgtatctctaatacatagtatgtttatttttctttaatgattgtattagtctgaacttttgacttctatatccaatgttcgggagtgttcataggtttctgtggcaactttatgttgctttacatcctggtgacaagtaatacttctggccgttgtaatcctttgaaaattgatgttcaatacctctagtctatgctagactgttatctacctgagatttagcactgaaatcgctgaaaattgaaggtcattgcaactagatcaccaggccttgtttttgatgcacttgttttattttattttccctagtgaaactacttgcagctgcaaccacaagataccacttcaaatataatcaatcattcacattgatggcaataacttaattagttggctctttggacgtgagtgcctaagccatattttgggatcattaggtggatatcatcaatatcccctctttgattacaatttgtggttgagtgtccatgaggactgtggagtctgtttttctaatgtagaatttgaagctcaggtgtcgtttctgagcttcattcttttaggcacagttctcttcctccttgtacccaacctggcagctcgtttagtcgcagtttggcttcagtggaaagtttttccttgtggtagtgtttgacaatatttttcttaggacgctctctcttctctaatatgcatgataaattagtatgatgcatctattagaatattctggaaatgaaaaagagaaaaatcattgctgggcatcctggccgtttactactcgaaatcctactgtcgctgatgcctggtccttgtcactgtttttgttttttgggggatgccgcatggatgttgatggtattgcttatcatgtaaaagcataatactcactcctttttttgctacatcttccatagatggatatctccttttacttgctatatttctttatttggtaatcatggcccaaaaaaaggtaccaaaattccctcttatttctttgtcttcttacctataactcccaaatatttgtcaattttcccataaagttatggtccacaccacattttttggttgtcctaaatacttgtgccacaacaatatagcaagtaattaaagacggaggaagcatttagttaacgtgtaccctttctccctgttcaaaaaagaaaaaattataataactaactcgcacattatcaataatagtattagacatagagttgagcctacagataaatggagctgatggttgtatttttttcagattgttcaaaggcttcattggtacgtccaggatggcgatatggtgagagctttttcttcagtctatcgccttcttttattagtattggagttccaaatgatacaaaatatgcaaagaatgttgcagcagctcttttttatgttttatgtatttagggtaaagttaaaccacctccgaaaataatttcttaagctagattaggcaaactttctggatattcaggtaattggtagatcatgttacaatagtttttaacgtcactaagctatgaactgctgatgatgttgcagatagtggacttctgttgtggttctaatgatttcagctgtttgatgaaaaagaagatggacagcgtggggaagaagtgcctattcagaaattacgatctctttccagctaaggtggactttgatttctcatctcataattgcatctttgatatattgttcttttggtatttggaccaatatagtaagttacagacctaacatatccagatcagtgttacctggaggctgcacatgactttactggtactatagaaatcaaattttttaaagaagtaaaagtatatgatttgtgtttaaaagtttgtaattttcaaacgttagagagttaatgttaccttaataatcgatccttatttcatggacttttttcttgtgaccaactgaccaacaatgagaccggatcgactagacttagatgtctacttgtagttttgctgtgacttgttcgttttttttttcaaaaaaatgtcaaaactcgtttatattttttaaatgctgcgtgtttttgtggttagaattaagaccatattctgtgtccataattattagaattagctttctggacacttttgaataatgaatacttttgaagaagaaacagaaatcagaaagcaaacttttcgcagaagtcgattcgtcaaaaggctgaggggtatctgcctagccggtgtcttgccaaaatagatgagaaggattttttttcctgtttttcatccccttataagttaaatcttacatctatttctcaattttagttgtttttatctttttctccgtttcaacttatttctgtaccttttcttttaatagagtaagatgtgttctcaattctatgcaatgaaatcagattaacagtttttataactatatcatctaaaagttaggataatctcttcttaaaaaatgtcagcttgtgtgcatcctgtgcatgccctggctccagtgtcccaaaccctttgtggcttggaggtcctcatcctcttcaaaacaaaaaataattggttttccgctgaacaaaagtgtctcataatgtaaaatgcaacatgcatgaggtgatgatgccttgcatggcgttattttcttacaagggttaccttggtcgagaaaagtgcctgttaaattgttattttaccttttaactttttcccttctgcgtgttctgtgccttgtctgttttcgacttcatgatctttgccttgactcttgttgaaccccagctttacaaggtctataatgaactgaacaatggactttggatggtaggctttggacctctcaatatcttagactgttttatactttggaccactcaaacttttgtgcttgaggtggatgatggaggtggggtccttggctccttggcatcgtactgatctggcaaaactatggccatgtgctgaatagtttatgtgtatcctggaaatacgcactcacttaagttttgaaacaaggtgaaggttttctttggctagaccccccactatatgaatttttttttaggggaaaagcaagctagattagggacagtttgttcagtttgtccataagtacataggacgccacctccggaggggagtggttttcccaaatttgttcaacacaaaaggctactagctttgctaaatggtgggcaacatagttcccgtctcttttaacatgagaccaaccaagagacttaaaagacaatgagctaaaatatcaaaaagaataacatctaactccgagaggaaaacagcattttttgagagacggttgataacaacctgacaatctgaaacaaggtgaaggtttgcattggctagacctccactatatgaatagaaaggagaagagcaagctttcccattgtattcacctataaagtaatgggttttaaagggggcgagcttacgtgccaggcctttctctgcctgataactagtatcgctgcctctccccaaaaaatcatcatttcttttaagaaagttgagaaatccgcaattcgaagatcgacgctcgggtaaagacaatgagtggctatggtaggaggcgtcccaaaggtaattaagtcgctataacagcagtaagtgattaattttgtgaatcagttgagaaaggatactttagtaatttctggtagaagcttcttaagaatcttgctagggaagcagccgggaacaatctagggcctaaaaatatcaatatgtatattgttctagaaattatggagagaagaaatagttaggagagagttcacctgtcacctcccgggtatgaaatattttattctcctaatattagcaatacaaatctatcctcttcgcctaatttttgccttttctcttgattcaatgtgttaacttaggagttcatagcaactatgttttaaagaatacttaaattatggttgttgatattgcaagttgagaaacaaatgattgaacaaaaataatttctgtacaagctatatgtttctcagagagcaattgatcatgtttagcagcacataaagggattttatgatatatataactgattggtggtagaggggttttcaaatccatgtttagagtggtaactgttatcttatcaggttacacttttatagctgtctggagtacaaaatttgtggtcggtatctctttttatagtcctggatttcatgagcaaatctcaaattggagaataatatcgtctttgggttcccttaatggggactttatatctatgtatatttttttttcatttgttaagggatctttgtaatttacagattcagcatatgaagtttggaaggcatggggggaggggataacatttaatgaaaagcttttgccactacgtgtgtgcttttgttggagaagctagttagtattttccatggttaggactccggagtcttctttgatgaattagtggtgttttaatcttctctttgggctcatgctctagctacattatagtacgtttttttgttcgcacaattgctttttatttgttcttttgctgttggagaaaatttgttttcttatattgtaattcacacgagttagctgtaccctattttagcactgggaaccgtgactgtcatgagtgtttttgtgcatctaaggccgtaccatagaatgatataagtgctactataggtattactatctcagtatttctttagcttcatcctcgttagtggcaaaggaatagattattttagtaagtacattcaaccaacaccatttttttcacccaaatagtatcccctttgaaaattattgatgctgcagttttgccaattagtgctcaagttttgtctttcatgatatttatgattaataccttttgtttgttatctcaaatcttaaattttgaactagatatgagaggagtttgtacatgttacctctcaaaatgtagtgtcaaagccatcatataaggtattcagtggacctagcgggatcttatgggtatctattaaggttttttagctgaacttgtctcttagtttattggcttcctgtgtaagagggaagcattgaaggatagtaatgttcttagctgggtcacaaacatgacaaagccaggtcacttagtttgtcacacatctcactcactaatcactatgcacgattggaggttctccaatctccaaggtttcatgcctatctagtgctttttatctgttgcgatattcatatactgttggctgatcattatccaacatgcagaatgatttcaattttgagcaaagggattggtttagtgttcatcccaaagaactggcagaaggttctcgactggtgagattctcgtttctgaagggtctcaatttacttcctctctcgtcattcttcatttaacttgttgtgccttgattcttattcttttggctagatcatggggctgaatcccccttttggttgcaaagcatcactggctaaccaatttatcagcaaggcccttcaatttaaaccaaagcttctcattcttattgttccgccggaaactcacaggtatggacataagttttctcttgtcattgattttcaccttgaattatggagtatcattctttgtttttattattaatttgattcgttgctgtaggcttgactctaggactgacaagaggtacgacttactatgggaggatccgcatcttctctctggcgaggtacatagtgaaataacttcctatttctgatccaatttctttctcaaatctgacttgttatgtatctgattggttatctttcagtcattttacctaccaggatcttgtggcactgatgagaagcaactttcacagtggaacaagattactcctcccctgtatctttggagtcgccctgactggactcggaagcacagggagatagctaacagttgcggccagctccagcttcagcttcctggtgaattctctcagccacctacttggaactatctacttgaagagcagcacgattgttatgatgatttttccaatttgattaatatgtatgacaatcttccttccatgttagatgacgttcctgatgttaatgataaggtttgactcatgtcaaactctatcatattgttagtaaacgcttagtattagctgtatttatctgaaaattctactgtgctcctaggaccacgttgtataccttgtacggttgtacctagtaaattcgttccagttgtgatgagtaaatgttctatttcaacacatgtttattttaagcatatttttcaacaaaaaaatatattctatttccaataagcaaatgttctatgtcaacaaatgttcgttttaagcttatttcccagtagaaaattatgttctatttttcgtgaaaattgttctattttcaatcagtaaatgttctattttaaaatatgttattttacttattttccaccaaaaactatgttctattttccctaaaaatatgttctaaattccataagaatatgttctatttaagtaattgaattctagtaatgtttcacttcaacaataaaatgttcattttcgtaattggattatggtaatgttccacttcaacagttaaatgttttttttcgtaaatgaattctagtaattttccatttcaacagtaaaatgttcgttttcataagtgaatttttgtaatgtttcatttattcgtaaatgttctattttatattgtgggagcacagttctcattgtgctcatgggagcacacattagtacttatcttcttcacttacaatacttgatatcttagctagatatattccttatttttatccttgtatagttgacttattcctttgtaatctatagtttcttttgtactccattgttcttcatgtactataaatgccacagcaacatcaattgtaattagggatatgcaaagatcaggatcggattgaaatctgaatcggaccatccaaacaactatcctattttgtactttttaggaaatccaaattccaatagaatttgaggtgaaccaaacgacctctaagttttgtaatagaagtatatatatggattttggtactggcagaacaatgtcaaatgttagctctccaagagaatttccatcttgtatgctgttgatcttcattttctttgtttttcagcaacatctttcctgcttttcttgtaaagatgaagaaaagaatactagtgtagtttcgtgaagccgaaaaagggcaaaagctgccctctaaagggatgggattagtttatgtttttattatcatacaaaattatatcaactacatttctgtatgtatattacaacttacaagcacaaaaatatctcaggccacatttgcagttctgccttgagcatttacaactttttcagtctattgattaactaagccagttaactttcatcaccaagggaatttagtcgtctcaatctttgatcaagttctttcatgacagcgggttcttgctttttcctgtgctttgatattgagttggtcgtcatagaaccaattttgtcaaaagcaacctgtatacgcaaaaatatacggagataaatgaaccggctgtagaacacgccaaagaaattctctgtaagagcttcagcttaccgtcaacaaatcgtcagggtcaaacatatggtgagtagttttgtgcaaaatgtgtataacatcaccaacatgatgagtcagaagcaactcatcttctttcatctgcaaataagagtttatcaatttcattaaaaattgggactcattctttaaaacagaagtatggaagatagagacccatagcacaaaaggaaatatcgtcaccttaaatatagccaaagctacaagaaacaaaacttgagctccctcgtagaagaggacatcccacacacgcatagttgtctgaggaataaactccagaaaggtagcaataatgagtaatagaagtcaactttatagattgaaaaacagacaaggagagacaaatctttggccaaacctccgaaggcaagctttttgaaaaaaggcacaagaaccattcagtggtgacaagggagacatcgaactccaaggcttctaaatgagcagctgtcctgcaatttccctttccattgtttcataaatacatttgaaacaattgatatcattagataatcaaaatttgaaggagatacaagagtacctaggatactttttagtgagtaagtccttgaaaactctctgctcaacatggcatccagataaattatttgtgtaacagtcattgactaaaacatcttccagtaggacagcaagcatccagaaagcatcttcttctgtcttcataacgagcaacaataatgctgcaacataatttaaaccctggagcaacaaattagctgggtgagtgactgcagcaaggcttttcagatcgtctacgtatatgattgttctattcaatgacaacgcctagacttgtagtatatgcctatatttggcaagtgatgaactaacagttgtatcaatttagtagtagtgtcaattttagtcacattatgcatttaggacattgtagctcaactcttgatttccatcaaaatccacatcatcattaattttgataagagaaacaataagagtgtaataaggtggtgaataaatctctttgtttcatacttgcagagttgcagttgtaaattcgttactctatattgaccatgtatttcctccaatggcatgacaatggagtggatagaatgataatagaagagggaaaatcgccatgtggcggctagcagttcttgcctatctttttaataatataataataatagatggtacttggtagagaagattttaaaaacaactcaaatactacaattaataatagatgaatgtagacagtagtttacagaaaccagaggcaaaaggagaaaaaaaagaagaggtgtatcagcattaacactttgtttgaagtgcaatgatggagggaaaggtaagggcgggaagggggagaaaaagaaggggagttaagactgagcttgcattctccttccaacatcataagaatttggttcactcaaaggggaaggagaatgaatccttcatattctcttcctttcgctattgttgtacttaaaacaaggaaaaatgaatccctcccttctaaattcccctatcgaaaaaattataagtgatgtcaaattgtcaattcccacaaattgccaaaataagctagacagaagaatcacctgacagtaaccaacataagaatcccgaaaagagtaaccaacaagaacacgtcggagcgctgcatggccctctggtgtatccaaccaagagtggccagggaaagtccgcggcaagtcctgcagatgtgtaaaagttgattaattctgcagtagagtttttatattgccctacagatattcaacacaccacaaacaagctaataactcagtccacaaagttgtccgccgaggttccaagttccaaataaactagaatcactacactagcctattcactgtaatgcaatgattgtaatgatgcatacaggaatttgttggtacaggtgctcgccaaccagaaggttcttcacttcaggttcatcgtcccatttttgaagggactaacctatatatcatccatttaaactctaatagtataatgaggttaccctatctcttacgttatatgccccgccaattttacaacctaatacatgaaaagcatgcatttgcaggatcagaaaggtacactacaactatgatactgtaataccaataaatctcactgaacctgacatatgagacatgctgacaaaatactcaaacccatagcttcataccaaaaacacaactatcaaatcatacctcaggcttcaccaacctcgagctcaacaaaaaatttcatattccacaatcgatgacaggaaaatatcaccaaataacacactatagcatgcatttagagtattaagtcttgaatacattaagaggcaactacctcatcgctcaaaactaggatgacggtacatgatcacgctaatcttaccaaatgtatcggtatcacgatatcaatcactacagaatacatacattacagaaagaggagctctattgataggaaaagtacaaaatcaaaaacctcatcatgcaaactcacatgtttcaatccgcaaactagtcaattgattcaacatcaataggatataaaagttaagtctgttacaaacagaatcagctataaacaatacattaagcctcaaaaagttcaactccctggaatctctaaatcaaaccaaccagaaaacaaaaaccatttaacaatctaacaaccacccaacaaaaaacataatccaacaaagtcacactcatagctagattcttcaacagttaatcaaaacacatcaactaaggcaacaaaattgagcaattaaactcacatgatcaatctgtttcgtggcgggcgtgggtttgccatcagtagccttaataagatcattataataactatcaggcacagtggatttcttcttagcagcaccagacaatgcaaaccagatcttaggcctcaaaacagggggaattcccttcctaattaacctcttcaatgtaatagcattagctaaagctgataatttaagggaagctttaagggttgatgagatttgagtatgaaggtaccaatttgcacctttgctagcttctaatgcccaccaaacccttccttgttccctaactttttctctaacttcattcaaaacatttacatcatccacattaccttccactgaaaacccataaatatcttggaatttcactgtcaaatttgccctccttgtatgaagacttggcctgtaattgattacttgagcctggtactcatattgcaggttttttttgttctgtgcactatacatttctctaaattatgttgattttgtatcaaagtttcaaacttttgaggacccaattgttagatttgatcaaattggaggtaaattggttcaattttcaatacccacaaaaaaataaccccaaatttaaatccatcaaaacttgaaaattcaaaatgaagaaaatgatttacagaaagatctaatcaatttactttgatgggttacacctagctaatatcttgagacaataaaatccaacattttgcaacccaactttacactttttaaaaaaaaaactattcaaacgcgattagattgaacaattgaacccaacaaaacaaatttgttccatgagaaaagcaagaacatttattaattcaacaacaaaaggaaatttattcagaataattccaacaaaaatgaaaaaaaaaaaagataaataaaattgaacaaggaaaaaagtgagttattttttccttgtgctttattttttttttggtgtatctagaatgcaaaattaggaggtaaagagatgggataagggggtctattgaacaccaagagaaaatctccggagagtgcgggataatggaaagctctcaactggataacagaggagagagaaagagaggagagagaaagagagagagagaggtgaggaggacacgacggagaatcagcttgtgtccgtgttgagattgagaccaccacccaataagtcaataagacaataacccacttctttttaaaaaaaatttgagtttatgaatttgatttgtgtagatatttgataagacattatttatgttagaaggagcttcttcccttaaaaaaaaaaaaaaaaggtaagaacaaggactttactgtaccaatactattcgaaaaacaattgtaagtcagtcaacccagttacacaggttcacaagtcggtagtggggcttgaacttgtaacttcaaagtcacaagttgagttcatcaccacctccacaaagtaagtttggttacgtctcaaaacgcttgagagtaggggatataaggggattcgtactcccaaatctcaatcataaataaacagtgggattcgaacttaatgtgagttacacatcacctgcaccaagtaagcttggttaaggagctttcaaaatatttggagcctatttttttctccgtatttagacgtttagaatatgggttgtttggtaaatgatttttgggtggctttttattaacttttgactttttcatctgctcaagcaaacaagctgtaaaacaaagagtatttgttcggatttgctaaagagttaccttataacatactactgagtcatgagaataaaaggataaaatgacttttacatagagaaactaatacaatatatctaaaaaattcaaattgtaatttgcatgcgtcaattctaacacaaaccttttacacctttttttttttttagccaaaaagaaagaaactagggaggaacccaattaacaggccaccctaaagcatccttacggatgattttggaaaaaacaatatcaggagattcaaaccaataatgagattagtagtggagtggccataatgtgccatccaatcggccgcaaaattagattctctaaaaacatgttgaatattataattatcaaattttctcaaatcttccgccgcatcattaatgagagcattaatagaccaggaattttccgattcttttgatagcttgaataaccgagagattatcaccctcaattataatattattagcccccgagatagagagctccccttataccttctcttagaccccgtgccctcggaactaaaatagaattattatctctatggcgttagcaccactaagcaaaaagattccccacggaatctctaaaaacaaagccataagtcggtacttccattcaagaacttggaaccatcaaaattaagtttaacaaaatcaagaggaggggggaccaaataatattaggcctaggatttttagttgctttaacaacctctcgactataatctaaattggaacaattaaacaaggaacaatctagattatgcatataagctttaatcattgcccctagtttggtgggagaaaagctttcctgacgaaaaagtgatactatttctagcataccaaatgaaccaccacacaatagcatagaaattgaggttcttaagagtcaaacaagacttaagattgcacaaatactcaataaaagaaagatcactattatcaataggaaggggagaaaaaaacccactgacattaactatttctaaaacatagcatagaaattgaggttcttaagagtcaaacaagacttaagattacacctttgaatgtggtcaaagcttttaaatacctatgtgacaagaagcccattttatttaccaatacggttattcgtcctttgtaattctgaacagttgcgattacatgaaagataactttattaaatttctacttttaagaaaaatggttaattttatatgagaagataacaaaacaacatataaaataacaaaaggcttgctagttttattataaatatgatatgaggaatgatattccgaatcctaaggcgtgtttcattcgcctcaactatacttgacataatttaacttattaatacttctttgtttttttatggaatcattggcattttcacgtttgtcaagacatttctttgaaccttaatatctctaattgcatataagtcaaaattataaaaaaaattgatatctgaaatcttcacgctaacaagacctcacttgcgcttgttttttcttacataatgatgtgaaatagtttaacaaagttggttgatgaatagtgctataaagcaaatggccggtgcaatcaaaagaatagaggaagtacttattagacctgaacttaagctatcatagtttatttgttgcaacttattagaactaatgtatctcgaaattgaacttgataattagacctgaacttaagttatcatagtttatttgttgcaactaattagaactattgtatcttgacattgaacttgataattagaccttaaggcaactttattatataaggcaacttttgagtactttggtgtccatccttttttgaccaatatacccctaataataaaagaaaactacaacacttaccactctattagttaagaaatgagaaacttactaacagctaacagctacacaccaaccactaacagctaccagcacagttcacagctactctcacagctaaaagctaccaccacagctattgttgccgaacacgccttatctccaataaactgcaaagcagttacctctcatctttcgactttgcacatatagtgtgcatataaaagccaattgtcttttatgtcaacttaaatgcctatgattcgagtattcgacatatcagaactagtttcttctaaatgagaaggaaaaccttctagtagtttctgccctagatagtagttactccattaaactagtagtttttcaatattgaggcatgactatagtaaaatgtgaccatgaggagttaacaaaaatagaccagatctttccgactggcgactaggtcgttcatatgacatactcccaaccaaaacaatgcttgtgagttgagaatactgcaatttgctactaattaaagacttggtccaaaatagtttttgaaaagaaaaggcgtcagaagagaagaggagttggataaattttttcatttatatgtatcatgtcgtacattttttatgtattatctaataataatagtgataatcatactaataatagtaaaaatagaaatggaaataaaaattattattactattagtctactacatatgtttatttattttttggggaagcaacaacatatgtttatttttggataagtaagctagaactcacaaaatttattttgactatcttttggtgatttataaaagaaatagtgttatgagatcttgttaaaatttaaatgttgttgcgttggcaaatgtgaaaagtttaattatatatagattcaagaaacaaaagtagtaattgtatataactcacataaacgtaccatacaacctaagcaattttagtgagggcatatataccatctaagatgcatgcatggacacaaaatagtgaaaaaaaatatattttttctctcttaaaatatgaaagtttcttaagtgagttttcttttctcctagatttaggttacttccatgcaattttcttcctgattatctcccatgcacaagccattaattacttctcaagaaagatcactcgtgaactttttacctgcgccggtaactattagtttcgtcttttggaactcatattgtaccatagtccatagggataaggtttgtttgggttagcactaggctcaacacatgggattcatgcattgatctcttccacccctgggttttctacttggaaactcaaccatgagtttttagggttttgcacttccaacctttcatcaacctagcatatttacaatgcgttttttgtaatacagatcacacataaaggaaaccatgcggctgcgcgcgtcacaagccatccccatttccttcgttcctccctcctccttcctcaaatcttcgatttcttcttcatcatcatcatcgcaaactcaaccttcgatgtcctctgcgtcaataacgacgtcatccatgaaggcgacgcaatcataattctttctctctctccattttccattttctctctccttggcttcttccgtcattaaagttgcgatgaccttggctccagcatatcctacttgacataactccatcgtagtcatgtgaagttaggtggtgtcaattattggtgaggaggcggaggaggcgaggagagagagagaaggtgaggaagggggaggaggtggaggaggcaaagagagagacggaggttggaggagtcggggtgagggtacagtgaggggagtagaagaggtgaacgacgattgcatacctatccttttgtgattctactaattaaactatcaaagaagccacatccttttgtgacttctgaccctacttcgagcttacctaaagttttgcctcgtaaggctgaatctgaaaatgtgttgaggtcaaaatttgccccagataagatagaagacctaccacaagatgtatttttgatgtgcggtgactcctaaagttatcacatgaacttgggcgaattagcttgattgaattagcccattcgtcgaatctggagattcgaccctgcaatcctgaatgtgaaagattgagacacaacagacatgattcctatcgtagattgagccacaatagacactcggactcctaaagctgcttgtaccaaacaatgccaaactcctgccaggttcaacttcactacagatcggatttactagatcatccctcgtcttaggaaacgaagatctttctattacccacctaacactactaaatatcaccctagcacaaccagaaacataaaggataattggatctggacattactaaactaacactgaaataaaggacataaccaatcaatcgaagaaacaatcaccataaccgtaaaaacgttcctcgattgcgagtcttcactacagtgatgcttctctgatgaaccgacaacacctaaccctcacaacaacaaaaactaaagggaagaagaaggagaatgaacttaaccacttcaatacctagaatgggggaacggggaaggggaaactaacctaaccacttaaacatgggaggggaaggggagtacaaataccagacagtggcgacgagatactaggggggtaaggggagacgcattaaaaagacactaaggaaggggaaggggagtacaaataccaggcagtggcgacgagatactaggggagtaaggggagacgcataaaaaagacactaaggaaggggaaggggagacaataatgacgcacaaaaactaccagcgagcctgcgtggggttggcctttatggtttgtgtttttttgggggaaggcaagagagtggcgataggttctagggtttgaggttatgactttttgtgaccttgtatgatactttcacactcttacgagtaattccatgtacttaaatcaaacattcatgaatgacggatctgatgttggttgcctccttaactaaaccatcacatgcaacatgatcaatatggctgaaagattgtaatttatcttattgttattttagattatgattgtaactacatatcggacggtacccctgtatgtccagtgtccatgcacgcatcacttgtataccgtcagggcatgttctccccaacttattttcagttccaatcagttctgttctgttcctaatttatttactagcattactattagttataatttaatccaattcagttcagttccaatcatttcagtttctaatttatttattagcattactattagttataattaaattcggttcagttgcaattagttcggttcagttgcgatcagctcagttattttatgtcgaacagataggcccttaatgtaattttaatcaaggatactacatgtactcaattattttatgtcgaacagataggcccttcaccatggtcttaagcttttcaacttatgaaaaagagcttttatttaacaaataaaaccaaattaaagggttaagggtatttggagggaaagatctgatgaattttttttgcatggaaatatcacataagtataaatatttatgaaatgagtgttgagttattccatcttccctaataaagtctaggttcacttcctaacctaaatatttgcttgggatttaaaggggagacgggggaggggttagcggtgtctggtttgtaatgggcttttaagtaggggagttatgataaggtagcttagaggatttctttttgcatttgaaaaaaaacacaagtataaatattcattactcagcttgatataccacatttcggttgtttggttgagagagttttggggtaaaagaataggtttggttactccaaacctctaataggagtgtttgattgagacttgagagaggattaaaagagaggcttgagcctaaatatctaaattaggaaaagctactagttggaactttttggaataacgatttatgaattttagttgtgtaatgactaataatatatatatcctaaagctggacaaatataatactctctctgcttcaaatataaggtcattctccatcgaaataaatgagattattgcgaagacaacacacaaattaaccaaatttaatttaccgatgtaaaggcaatcaattaagaaagccgcatatcccttatgatataccaaatctggcactgtaaatagatctgccatttcttgaaatttctcttcggattcaaaattgtggtgtaatgggtatctccccctatttcggtcatagaatagatgacataagtaaaaaaaaaaaatcatttttgttcaagaatgaaatcttatcggaactgttcatatgtggttcatccgtcagaaccatatcacatctcggatctgatgaaataggatgaattgagatggtcgatattagaggttgaactttaactttctctcaattcttgttgataaaaatataataaaaaaatattaacatagtatttttcaagacaaatttgatgatataatttttatttgtcatatcataatagatatttgtagtcaaagaaaattttcgtgaagcgtgaatgtctgatatttatttgaaacagagtgagtatcatttactaaaaaacatccaccaataaattatttcaatatttttattggttatttcacctaataaagtaccaaaattagctaacatttatctatcaaacactttcacacaaacaactagtcagactaaaccagctaataactaatttaaacatctaacctctaattgtcaaacacgacctataatttcttggcaaaaaagtcaacttttcatattgaattcttatttccccttttttttcattttcattagcaatttgctacatagacaaattcgctttttataaaacctcttctttctaggggaatgctgaggaaaacaacgaaaatatagacaattaagaaattaacggttgaaaattgacttttttgttggaaaattatgatgtgcttttaagtaattaacaaatatttatactttatggttacttcatgcaaaaatgtctattatgtatttttctacaaacgccctttttaattggtattatatgacaaaaaaatcttatgaaaaattatcataaaattattacaggaaaatttaatatataaactcgatttaataagatatgtatattgaaaattttctcataagaattattagtgtaataataataaggaaaagtcattggcaaaaatctaataaaagtgactttgtgatctactacataccttattaaactgactttgcgatgtactacataccttattaattattattttttaaatgtagtttaactctttttagtttcctccttatgttcctatttgttcttttttgactttttttgtctgtaaaaatgattccaaataggacgaatcaaaaggaataaagagagtatttaaaacaatatctcataaatttaacgattttttcaccatatattcctaataaattaaaaaaatcaccatatatctctcattatttcatattttcactatatatttgtaaattttcgaaaacattcaccaaatgaccaatttttttttttttttgaggggaccaaatgaccattttctaatagacattaactcgtcgtttgcattatttataactttgttattataaacctaattaacccctcccttcatcctaaccccctaaccctaacgccctaattaacttgaccccctaaccctaaccttaaccaccaccactagaaccctaaccaccaaggggaaatagaaggggtggcgtggggtgggggtgggggtgggggatgtcgcagaaatgggggtgatggaggcaggtggtggtggttagggttaggatattagggtggagggagggactaattaggtttataatggcaaagttgtaaataatgcaaacggctagttaacgtcagttagaaaaaagtcatttggtgaacgtttttggaaactcaagggtatatggcgagtttttgaaaattgaagatatatggtgaactttttaatttgtcagaggtacatggtgaaaaactgatattataaccctatcaccaaatacatgcaatactcggggactgttcttcccaacttattttcagttcaactcaattcagttcagttcagttgagttgcaatcagttcaattcagttccgatcagtttagttctgaatttatttatcatcattatattagttataatgtaattattttcaattcagttgcaatcaatttggtttcgttcaattcagttgtaatcagtttggttcaattcagttcatttgttttttgccgaagaaaacattcccttgctctgtcacacgtttctaatatacaattttgataaacatctttaactacatattattgtggtaagaatgtgatactcactccgttccataatactctttacacttttctttttcatctgtcccaacatattttttgcactccagttcttggatatgatccactattttttacactccagtactatttttactacctattaactcctatcatatctacctttccaatagaataataatttttttttttgaggagaatagaataataattgctaatcaaacaacttattatctaaaaatacgtatcataataagtgtcaagaatattttgggacgaataagacttttttttattgagggaccaacaagactaacaagatctcaattttctcatgttaatgtgtagaaagaaggaaaaggcacacgttgtacacttacacttatttaaaaacgaaggagatatcactttggatagcaaagaggacaaaatttaattgtagaatggctagaatgaaattggaatatatgaatttcttcattgtgtaacaaatcagacttcccaaacatactcgcaacatcaaaaattcatatcttcaactatagctaccaaagccaattccattgttgcttatgtagtcaaaacttatacgtgcttgttggacaaaaaatcgtggtttcgactggctcatctggcccaagcccgcaaatgatcacaagtgagcccggaaaaaagaagtcgagctaaatttaaaaaaggatagttgataaaaaaaaaaaacgatatcccatccgcacacaatcaagcaatgtcacttcgatcaagcatatcaaccaaagtcattcgtcttgggaatctaggtggtaaccttaagtacattgcatcatcaatctcaataggcagatgagtcgcaacgatcacaattcctcccttcttccgatgctcagcaattatatgctccaatagttttaccccatcatcatccaaagcaacacttggctcatcgagcaaccaaataggccgatcaattgcaagcaatctagcaagctgcaccctttttctttgacccattgacaacatccttgccttttcctttgctaatcttccaagtcccataagctccaatgctggtagagatctcccttcttttccttcgagaacttcaaaccactgaatattttccaggactgtaaatttctccttgatagcatctttaagagaaacccatcctagttgaagcttatattgatggaatactcctgactgtgtaatgtcatgaccattccaaaggatttcaccagcagaaggctttgaaaagccagctaacatgcgcagaaacgtgcttttgcctgaaccattgcttcccgttagcacaagtgcacctccatcatgaactgatacattcacatgacgcaaaatttgctgggcattccgcatgcaggatacattgttaagaagtatacgaggaagtggaggttttcttagagacatctacgcactgaaaagaaaggaatgaattaaaaagatacataaagattacaatatataaaataaatgaggagtgtctcatcaccaagttacattatcaataaccaccacatacagaaacattcaagatatgattggataagagaattgaaagaggcataaatgtataacataccctgagaaatcaacacatataacaacgaaaatctaaatgtagcaaatgaatcacacactctctattctcaaagtctcgatatgattggataagagaattgaaagagaaaagaaggggaggagagagtaagcgattgatattctttcatttggatatggattagggggagaagggaaactgaaaggcactggcaaatccaactcctaaagttgaaaaaatacaagagtaactaaccagcatgaggcgaccaggctgtgaaacagaacacgaagttgcaaaggcatatactggtagttcacccagttgattattggccaaaactgcaaatgacggcaaagtgaaataaggaatcctagcctttattataccatcccagatgccataacatatcatcagtaatatagagcaatagaacactccctgataaagctatactccaagaacttcagtaaaatgagaggatgattcaagaaaagagcataatttaccttccacgaacttaattgtatagtaggatagtctttcttgaccttatttttctctagtgaccatgaccttcctgatacaagagagtagaaatattttagtgaactcagaagatatcacttgatcttaattgcaacaaacataatttattccatatcaaagcaaggtgcataacagacatcttgcattatgaacttgaaatcttccattatatgttgttaaattgatttgttataacaaaagtatatgtaccaacaatatgcagcaaataaccaagacctcaattactcaactttcacttattatttttaggactgtcaaaagtaaaccagaaatttgtgagatgtctagctcagagtcaaaaagacagatgatgaacccgttgctgataaaagctggtattctagtgaactttctgttccaagagagaatttaatccctaaaaaacattcagtcaataccatatttgatcaacataaagtgcacgatcacatagtggtagcgtcatggaattgcatggccaatcattgtgggtgttacactctattgacgttgcaaaaaagaggtgtttttcatccagctaacaaaaagctcaatgtatggaaccctaaatttttagctgaactgaaaagggctataaaagcttcattatgatctaaagggaccctattgacattgcacaaaagcaatgtttttcagtcagctagcactgaaaagggcactcctatcatttttaacaagtaaaataaaacaatattgtgatgttacatttcttgatattaaatatttgacttattatacctgagtaggaaactggaaattatagaagtaaaatatttgcgaatgcaggaaggggctttgcattaaaattgagtagtgtagattaaaagttcaataagactgaaataaaaaggttctatagcacaaaacactatctacacccagcaaacatgacttaggataataaggtatctcaaaagaggggcaaaagcaaacaactcatctaacagagcatgccttaatctgacaacaaattttatttcaaactctttgtgacaacatagccaagtgagcatcattttaggccttgtttggttgacaaaacaaatcatgggaagtgcaaattcctaggaagtagaagtatatgaagttgtttggttggcaaaaccatgggaatttgcacttcctaggaagttctacttcctccaaaatggaggaagttacttacctaggtccccctaggtaagtagaacttcctgtgggaagttctacttcccattatcaaccaaacacaattttacgcttcctaggaatttcaaatacatggaaaaaataacttcctaggaagtatgacttcctatatacaaccaaacaaggccttagtgaaaagtaatggacataacagttgatcagattaatctgttgatcatgacttaaaagttcatacttttaggtataaggcagttcgaaaataatataggactattctgaacttgaactgctatggatccccactctccagatacctccctggcggcaccaaatctcaaaaagagttcaacaatctctcgctaaaaaccacataccaagaaatgagtagaactacacaaaatcttgaaaatcatgaaaaacatctacctgatttgagcaggatgtcaaagaaccttactagtatctattaaacacttattaagaaaccaaaaaccttttaaaaaaaactaatatcaatatgatctaaaaacatgaagctcatgataagatagatctagatagtgcggatccaagatttttaactaggtgttggcaccaaccaattcacacaagaccacaagaaatatattcaacatatcatataatatcaaatcacaactctgcaatttgactagtggcataattccattatgcattggtttgcaaagaaactagaaaaaattcctttcattaattcgcttcattattgaaaagttaagattatattatattcatcttaaatcactttcctataacatcaattccacaacaatgatttcatagattgttccaacatcaatatgtaacaattcccataactcggagtagattatcgagcaaaataggagtataaatctatattggtatactaaaaggccttcctaaaccaggaacgatgccacgtgacgctcttcctaaagcactgtactccaggtaatccgcatacagaaaaaaaaaaaaaaaaaaaaaaattgcatagcataaggtttgatgatttgatcccacgatttcaaggttatatattaaagtcttaaccactgttgactagaccaatcgatttttagtattatcattttagtataatattgataaatgaaaattttccttacctagggctaataactagtttactccatgaaaacatgaaacaaattaagcaattttgcgtgagcatcattgaaaatgatataaatacgcataaatttcgtctataaactattgaccaaaagaatcaatatattcggcaatgtaatttccaattgtgcataaaaatcatattctaattctagttcatcaagactcacaagtcacaacaaatatatccaaaaacaaaaataagaaaacagaaattttgcaacggcgatacgagaatcgatgaactgacctgtcgtccgctgctgctgctgccgactccaccaccactgataatcgtggttgtcgaattgccgtcaactatgcgcgcgttttcaagtgacagtgtattgctgagtcaagattaggcgagtgagattggccgagtcacgagttgcgactcagagagagagaggttgaagtagaaatgttactggtatgtggtggttattgccttattggtaatgcaacttggtgatgagaaactgctttccggcgagagagagttgctattgtcgttggtaacatatgaagagtcgtataatacggtggttttacatcgcttatgagtctaaacacgagttgactagggaatatactacctctgtttttatttagttgcaacattttgactttcacgtttgccaatgtacaatttcaaatcgttttatctctaattgtatgtaagtaaaaattataaaaatttgatattatgaaagcttacatcgaaacgaatcaaacaagaccccacatgactatattttgtttaacatataaatcaataaatgtagtcaaataagagaacatgaatagtgcaatttgtcaaacgttgcaactaaaaaagaacggaggtagtattaaacatcatatgaccgataagaaacaccaacacattggacattaaggcatgtatagtatgagaaagtatttgcccatatccgatatgggactactttttccatatcggatacttgatatgattagatgtagtccagatataatttaatagctagctgatatgatataagatttcaactaacaagctcccaaaaaaaagaaaaatgaaaaactaaaaaattagaattttttaacattacttttgtcataaaaattacataaatgtcatcatatgaccggtaagaaacaccaacacattggctagtaatgcatgtatagtatgagaaagtatttgcccatatctgatatgggactactttttccatatcggatacttgatatgattagatgtagtccagatataatttaatagctagctgatatgatataagatttcaactaacaagctcccaaaaaaaagaaaaatgaaaaactaaaaaattagaatattttaacattacttttgtcataaaaattacataaatgtcatgatattggctcatatcggatatgggcatatcattgctctgtatagtataatgttaggggtaaggatcgaacccctgacctcaggggccaagggggagcgctctatccacttgagctaactcatatccttttaaaaaaatctattataatactagggatttttttattattttaaccactttttaagatcacaatttttatgattttttttttttgagggaaaagagaagtgcattaatcaattcaacttctattcttctccctaaatctacttaaaatcgccccaagtttatttttttagactattttacccttccctttttttcacaccaccaccacctatcacccccggccatcacctacctccccaaccaccaccaccttcgcgccatcacctacctccccaaccaccaccaccaccttcgtgtcactccaccaacaattaatggcgctgaagtttttatatcatggcacgaacgtccggccaggacgttccacccatgggaaaaaaaaatcagcgcctgcgaaggtggggtgacgcggaggtgaaggtggttagggaggctgagtgcgacgaaggaagtggatttgagggtgatggagtaaggtgggtgggtggtggtggtacgatgaagaaggagatagaggggtaaaatgaattatgaaaatgcccggaaatttggcaggcacaaaggagtgatggtgggtgggtggtaatacttttagctagtctagcattttattgggcttaatttcgtggagtgaggtgatggtggtggtagtgaaggaaggtggtttaggcaaaaataaagaaaaggttagggatgtaatttcaatttttttgggggagattttaagtagatttggggcgatgtttaacaaaccccttaacgaaggagttacaaacttacaacattaggacaatgattctcccaacattgttctactccaaacgacacttttctatcaagattatgggaaatagcaatctcatctttttttaacatgagcaaaggaaacagaatcaaaagcattacacacagaaagaatgtcaccaagtatagcatccaagtctcagaagaaaactgatgcttttgtcaatcttgtggtcaccgcttgcgaatccgatttaatgatcacatctccataatcgtggatttggctaaacgagcaaccatatagatggcattgcattcagcaaccctcgtgggccaaaaagcacgcacacgcctagttgcagagaaacacacgttaccatccgagtcacgggcaacaacaccgagtcccacaattttcaagataaccactttataagttcattttcaagataaccattatataagttcattttcaagataaccactttataagttcatatttttaaataaccaccttatataaactaaatctctttaaatacatatcaattaacatatttcgtctaagaaatcggtctttacaaaaattaaaaccttatatacatttatccgaatacaggtggaatgatggaatcatttttaaaccctttttgttgatgattttctttgatgtgatttgttaattggtagctaggtatataaaaatatttaagtcatataagttagttatttaaaaaaatgtacatataagccataaggtggttattttgaaaaacttgattttaaggtggttaaagtaaaaaaaatcctaatactaatttttgttgtataagaccaactcactattttccggtaaaagccaattttttggctttaacttttcttcccctccctttctcataaatgggaccaacttattttttttctatcctaatctcttaaaatgattaataagttggtcccatataatgagaaagggaggggaagaaaattcgttgtcggaaaaaattgatttttttggccaaaagacattaaggtggtcctaagtaacaaaaagaagtactataataggtcttttctcaacaaattttttttattaggtcttccccaacaaaaatagctattttaataggtctttcacaaccaaatagtttcgaaaaataatatagtattttattcagcgtacgcacacgtatgtatatctatgtcgatctcaatactttaataatatgatagatttacaaaatcaaatatgatcatacctctatatcagtcaatgtataataactcgatcttgaaactagtgatcactaaatgataaagaaggtaaccatgtgatataaaatgaccggatccagagtttaatcgaagttgaatcgacgttattcgatagcgaatggacccaatgcttcataatgatcgaactatggtcataagcgatttagccgagcacacttgactcaacttaagtgttcatgaaacccaaatacgatctacgcaaattcggctttaaaatgcccacgggtgatcgaatctagaaacagatcgacttgaaggaaacgacccatacttgtccgacacctgtcaattcgatgattctaatgcgaccaacctagttaaacaaaacatgaatgatccgaacgaaatgaacaaaacatgactgatcccgactcaaagcactgactgatgtaaaattgacatgttcgggtctggttcaccatgagccaacccataacctattcggccaaccaatttttaacaccactaagtaattaaaggtaccattgttatatttttgtttttatttctgaatgacgttacaattattatgatccatgattgttatggggttcaacacgagttatgttatgcgctatctttttaaaaaaattatatgtttagttataatttttttaaaaaatataatttaatagaagtgttttacctcatttaaattattgtagttctgtttgaaaggaattttatagttatttaattcgatgagtagatttcgtagtgagagaaaactcctgattggatcaacaggtcattagaccattattagttgaaatattggaatattgatcatcatatgtgtactgtccgtcccaaacgatatgaacctaggaggctatgaaactccatggaataatgatgggaactataaagtctcaaaagtagtaatggatcctggacaaaatttacccatatcacacctgtagcatgattatttatctttaatattttctctgttccaaatcaaatgcaacactttggttgacacggattcctaggcaaaatttcttaaagggttgattagcaaaagtgagggcaagtgcttagtgtaattaaccaccacctactgccaccaccaccaccgaggcaccaccaaggcaccaccaagaccaccaaaacgccaccatcatcgaggcaccaccaacaccaccgaaacgccaacacaataaaaaacaccttcatattacccccggaattcgaaacgcaaatcaaccgaaaaccacctgcttgctgcccacgaaattcgaaatccaaatcaaccaaaaaccacctttcggttgcctatcatcgaaacgccaccaccaaaaaacacattcctactacccccaccacccaccgtcaaaaccgactcctcctccacaacaacttgaaggcgagagaaaaagatcgaagagagagagagagagagtaaaatgcaggagagaaactgaacgagaagagagagaacgaaggaagatggaggtgagagaacgacgagaaaggtgatcgaaggtgatagggtggttgtcggcgccggtagtggatagcgaatatgatagaggatgtcagtggttttgggctggcgggggaggatatcgagggtggaatgtcatgaaggtgatgatgatggtggtgggtgatgggtggcggaggacgtatgaaggacgctagcgagaatggtgatgatgatggtggtgttggaggaaagaagatggtgatggaggagaaagaaaggatgattgaggatggagaaaatggtggtgggtgaaaggtggtattgaagagagagggggtttgatgtttagatatattaattttgattaggtttgtaagtaatttgatttgggtagtataacatgtattatagttttttaataaggatattttggtaatttcaggggtaaaattcataccaaaaatagaaagaagaagagtgttacatttaatttgaaactatcgttttaaaaactgttatatttaatttgaaacagaggaagtattaaatgttatttctattcaattctcatttattattttgccgtaggaaaggtatgtaaaagatctataagatgggttcatcgtaactaagaatgacaagtaaggttgaatttgaccctagtttgacatgattctacttcaaaaaagaaacatctaccttcaagtccaatttcaaaaatctgatttgagatagaaggagtcaatggttgggtcgggccgagtcaaaattcgggccgaaattttgtttgggtcaaaatgagtgggctttttaagtcaaaaaataaactcaaaagtcatttttgacttgcccaaagtctacttaaaacacaaaaaaatctgcccaaaatcgtgtcaaaattgagccgggtcaaaatgaccagctctacttagcagttagcaatggttgattgtgggaccaattatctttcttaataccaaggatgtcttgacctagtggttaagattgaggtgctgtgaacgataggtcacaggttcgaatcccccatccccttctttgtactttgtaccgcctttgtggctcatatggatccaaaaaaattatctttcttaatagagttttttgtcagaaacaaccttttgtaagtgtcattttgtcagaaacaaccttataaaattttttttgtcaaaaacaacctttaaactcaatttttttgtaagatcggacactggtggctattttcccagcattgatcgggattttccggccttgacttttttactccccctccctctcttttattttacgttggtattaattttccctccaatttcattcttaaaacccaccctatttcaaaacccacaccctatttttctctctcctctctttgggacctgtagaggcattgaagaccttagctactgtgattgaatgcttcatgcaatagtaagtaagagccattaaacttcccatgtcagtaatttctctctcttgatgaaattacttctcttttcttcgataattctttctctcttaactgtacatttttctcttctttttgctaattttggtgattgtgtgttttccttttttgtgtgatgaaaataacagattaagttcaaagtaatgtcctaattcaattaataagataagccctaattcaattcaaaaaataaccctaaatgttatgaacaagaagaaattaattgagatgaaaaatcataaacttaccaattgaagaaccctaaaatagaacacaccagatttagggattttggttggggaattttcgaatttgggattaacgaggaagagagagaagaaatagttatataagggtggattataagcatgaaattggagggaaagttaataccaagtaaaataaaagagaggaaggggggtaaaaaataaagtcaaggccggaaaatctcggtcaatgcttagaaaaataggcaccagtgtccgattttacaaaaaaattgagtttaaaggttgtttttgacaaaaaagattttataaggttgtttctgacaaaatgacacttataaaaggttgtttctgacaaaaaactcttcttaataataaataaaaaaacaatattgtcgagcaaaagtgcgcgccaaataagctaaaaccgcaccggtaaaactaaaaccccttctcatctatctctactctttagtctctccctctcctcgttcaatctcaaattctgaaatcaccataaaaatggtgaagcaaaaacaacaggtaatttctcgattctttgctccaaaatccaaaaccccatcatctccttcttccaacaatgatactaaaccctcatcttcatctcctactcctaaaatcactacaaaagtctctttctcccctgcaaaacgcctcaaatcttctgaatttatgtcccccattaacatttcttcaaaaagacccaaactttcccctcatacccaaaacccaattccttcttttcccaattccaatcctacccttcaccagaaattcctcaagaagcttctagaacctactgatgatgctctagatgcttcgaatttggacaaagaacctcatacttctagaacaaagtataccccacttgagcaacaagtggtggagctaaagaatagatacccagatgttttgttgatgattgaggttggttataagtataggttttttggtagagatgctgaaattgctgctagggttttaagggtttatgcttatgttgatcataattttttgactgctagtatccctacatttaggttaaatgttcatgttaggaggcttgttagtgaaggctataaggtgggtgtggttaaacagacggaaaccgccacaattaaggcccatgggtcgaaccgtggcggtcctttttcacgtgggttgtcggcattgtacactaaggctactatcgaggcggctgaggatttggggggtggtgaggagggttgtgggtcattgaataattacttgttttgtgtggttgaggaagaagttttaatggaaaatgtggattttgggattgaagatgtttctgaggtgaagattggggttgttgctgtggaaacatcaactggtgatgttatttatggggaatttaatgataattttttgagggctaggcttgaggcaatccttttgagtttgtctccggccgagttgctgcttggggagcctttatctaagagaactcaaaaggtaaattggctacttctaatcctatattatagtatatgtgatagtgtttattgcaattacttgaaagtgttgagattctggttcaggctgttattttctgtcataattgtcttttgtaagtaacaactcatcttggatattagtacaatagtacttaattggattgacgaatatgagaactttcatatgtggtgaccggtgagaaatcgcactttctagctcatatggcatgtctatgagagcaaactagctaaaactgtcccagcttttggataggtggatgatgcagaactagtaattttaaaagttcttagttattagacagctaccgtgttattgattgagtcgcgtattgagtttcctattatttattattttgacttatcttcatagttgctattggcatatgctgggcctgcatctagtgtgcgtgtggagcatgcttcacgtgattgcttcaaagatggtggtgcactggctgaactgatgtctttgtgtgaacacacgaatcaaggaaattttgagcatttgcaagattgtgatggaggagttgctggggaaggacatgggccagcaattaaggtattttgttgcgatttcagtgaacaatttgtttattggcattttggctgttctagttgtctatgagcttctataattgattaatcagttacgtattgttgatacaaaatctgcttgttcccttgtctactttttatgtttgaagtagtaatctctccatttaatgatgaactttacctacgggatgagcatggacatgcgaataggtgttaaatgtaaaattaattgttgaaagtgggtagaaaggaattgggaaaagtaagcattgtcagggaatcccaaaatggaaaatgtgaagttactttctcatcgtacactatttgtcaccccccccccctcttcttactttcctgtaatctgaaattttgaatttataggggatcatggatatgccagcattggctgtgcaggcattggctgttaccatgcaacatctcaaacagtttggtctggagaagattttgtccctcggagcttcatttcggccttactcaagcaattttgagatgaatctttcagctaacacgcttcaacaactagaagtaagttacaacttttggagttcatcaatacaggtcttgtaaaagtcaataatttatatagggtttctctctcaccctctgtaccgagctctctgcagaatcaggtttaaatttagaactatgagatgttttccctttttgagttcaaactttgaccatgaacttttaaagaatcactagatactatagaagttctaattttatgattattgttaattacgatttatcaatataatctaagaacattttgtagtcaaaatgagaccttaaaaaacaagaagcaaatattcaaaaaacagaaatagtatacaacaattgaccaacgagcactagcttcatcaacagatagaataggattttgtatttttcgtctcatcaataattgtttgttttgaaagttattttacactttatcaaggttttgaagaacaacagctatgggtcagcccctggttcgttgctgcagactatgaatcatacccttacagcatttggacaaaggcttctaaggcattgggtatgagaggaactgaactatagcctcaagtacttcgattttccgtctttgactgtaatctttattccctttttcaggtaactcatccgttatgtgacagaaacatgatagctgctcggcttgatgctgttgcagagattgcggaatctatgggtggctgtaacgcttctatcagataccgacatcttgatgaggacaactctgatactgcagctgttttaagtgatataaattttgtgctatcttcagttttaagtacattgggacagtcccccgatgtccaacgtggagtaacaagaatttttcacaagacagctaacccgtctgaggtagtttcgttatttattccttcatgcttcattgaaaacctgaagatttttaccagttcgtcatggatttataggttactttacaatactagggttaactgcaactctcatagtggtaaatgtatttcagtggttacgtgaatagaagtctcaaagaagttatgtacaatgtgtgagtcatgattgtgcaagtctcttttacttgtgctttgaagtactatagcgtacataagaaagtagggagcgcatgtatgcttcaatttttgttatctaaacgtatttacgttgtccattaaaatttattctatagtcgtgttcagtgagatattaaagtcctgtgggctgtggctgaaatggaggattgaagaaatgtatgaaatatgcttcctttaagctgtttgatttagtagcaatatgaataatttcatcttggatttgtggtcactttggattcattatctgcttcagtgtcatatattactgacagttgctgaaaactgaattctacagttcattgcagttgttcatgccattttactagcttcaaagcaacttcaacaacttgaaattggaacagtccattctgctttattgagaaacttgattcagactgcttcttcatccagcttgataagccgttctgcaaaatttatgtcgtccctgaataaagaggcagctgaaaagggggatctgttgaatctcatttgtactgatgatggccagttttcagaggtttttgcaagaaccccatcttcagcttcttccatctaattgaagtacctgattttttgtcgatgtgtaccattcatgtcaggttgcagaagctcgaaagaaggcagagggggctaatgaaaagttggaatcgcttataagtttgtatcgcaaacagcttaggatgcatactttgaaatttgtaactgtggctgggacaactcatctgatagaggtgatgtgcctaatgctttccatttttgctatatcttgcattgtttggaggctgtagtaactaatgataaaaggtttaatttactggatgtatttatccatttattgaaaagacaaaattctatttgcagttgccttcagatgctagggtacctccgaattgggtgaaagttaatagtacaaagaaagcagttcgctatcatccgccagaagttttgactgctttggaccagttatcattggcgaatgaagaactgactgtcatttgtcgttctgagtgggataagttcttgggggaattcgctagacattatgcagagtttcaggctgcaattcaagcacttgctacattagattgtttgcattctctcgcaattctctcgagaactaaggtatgacgtagtaatattcatacttcatattcaggctcgacttaccacttatctctcctttcctgcattctataacttttaaccttatgttcatcttttcatatctgccggctctatgcctctgttacctatttcagaattatgtgcgtccagtttttgtggatgataaagaacctgttcagatacagataatctctggacgtcacccggtgagtataatcttatgtacacttacattttctttgtgaaagttcattttttttatggggcggggtaggggggtgacctgtagtcctagtttttggatttatggaagttcacttttctgaatttaatattcttggcagtgtaattcatttgtttttgcttaatatagtatgaactttaccattatttctatgccacgtaattggttatgtatgaagaggaacagcacttggatcttgatcacacatatagatgtcaatgtatattaaagaaaatgacttgcgcttttctttatttgcctaaacaatggagcactgtaggttctggagactatattagaagacaattttgtcccaaatgatacttgccttcacagagatcggcaatactgtcagataattaccggaccgaatatgggtggcaagagttgctatatccgtcaagttgcactcatttcaataatggctcaggtgcgtatgagctggtcaacgcctccacccccttctcacaatgactaattttccttttatcttagtttaaggttgcatgtcttagtgcaccattttatttactgtctccatcccatcttaattcctgactcaaacttttgccttctgttagttcatttgcaattaatctcataacctgttcaaatgatctgcgtttcagagttaagcatgctatcagacatcagttacttcatccataatactctccttcagtccttcctcttgaatctagtttacatcttgtcatataaattgctgatccagttacttaatattcgtcctttgattgtttttctctaccatttacaagccattaagttgcttcgcctctgatatctctgtcgaacttgctgatactcgaatatagagtttcactagaactgaagttttgggaacgactgagatctcttcttacaatgtttccaggtcggttcttttgtaccagcaatttctgctaagcttcaggtgctggattctatatatactcgaatgggtgcttctgataatatacaacaagggaggagcacctttctggaagagcttagcgaggcttccaacatactccacaactctacagcacactctcttgtaatcatggatgaattggggagaggcacaagtactcatgatggtgtagctattgcctatgctactttgcactatcttctgaagcagaagagatgcatggtgctgtttgtcactcactatcctaaaattgctgatattcagaaagaatttcccggtgtagtggggacgtaccatgtctcatatttgacgagtgggaaagacgaagacgttgcatacctctacaagcttgtgccaggcatttctgagaggagttttggtttcaaggttgctcagcttgcacaggttaggcattgtcattcttcaccatgcctgtcattatttctaaacccccccaccccgcaacaaaaaaaatatacgaagatagacaaagactctgcatcagtttattgcaagtattagcacaaaaaataatgcaagatcaaaagaagggcttcttttttttggtgcaatgaaaagaagggcttttgacaaggacccaaatctgagatggcagtttatgagctttgatgaaagtgcaattatatgtatatatatacacacacctctcctcggtttctgtttaactctccacctttcttttaagggaaatgtcacaataagtgacacataactcaaagcggtaaaaaaaccttcttgtttattatatcttttcccctatttaattgtttcactatttaattctcaccctccattagttaaacaagtggtcccccacgttctttctctaagtttcttggtattccccactttctctttgtgtcacttaaaaagagaacgaggaagtatatattattgatgcgagcacgtgtaatattgtaattgactagaagaacaaactgtgtcggattatcattggattcatgtgaaggtgcatcagttaacagttaacacctcttaattgaagttttggaaatctcttgatagttggctgtcgattttgatggctttgaaattgtcttgcttggtcttgcagcttccaccatcatgtattcaacgagcaatcatgatggcctcgaagttggagacattggtccaaaggagaacagtaaaccgccttggagaaacattgttttctgagagactgtgcacaagtggtgaaagtgaagcatcagataatttatcagatcatgctgaaatgttggatgaaaatgatgacagagacatggttcgactgagtactgttgcttctaagaagttctttcgggatctgtggtcagccttgggtaacaatgacctggcgaacagatatgattttttgaagactgctaggagtgctgcagcagagttgatcacttggtaagcgtgaaaacatcatctattatgtcaaacccctccccccttccccatcaaaatcacagccccgaaaaagatagatagaataatcatgagaagaagactttcattttcacctgaaaacaataattcgatcatcgataaagtgattatggaagctttctcacctatgatttcaatcaagcacgccatgggaaatttttgcgcatcttcatacatccatgacccacttgattaaggtaggtaatacccctatttggtttatcccaacaaagccatgcacatcggacatttcactgatcaattatgtcaagttcttataagtggttccggaccataaatagcaatatatcatgctgtttctatatcacttgattatagatatcatatggcaatacagagtcatgtcttaactttgaaaatcctgctaaagatacactaaattgtggcttctatgaagcaagggtacaggtttcccatgaatatttccttgatgaattgaggcagaggggggggggggggtatctcaagtggtaggtccagcgggagcctcgtataagccggttcgaaccagatcggacctgcttgatgagtaatgtttttcccctaggactttgacccacactgtgtatcaaagatgggaactgatagtgagatgcatcatataccttccataaacgatttgccttttgtgctttttgcagatgagtcagagtgctgccaacttttttgttctgcggcttgtggaagtatcaggaatgcctgtttgccctcaacatatttcaccaactcttactccatgtgtaatggaactttgtgtacatagaatcatagatataacaaaatcgggctcattttgcagtgccctattccgtaatttgcatatcaaatttttgtaaatcttgatgtcttgagatggagcagtaggcggattctacggttgagtcagtggcgagattttacatgtaccaaatgaatactttacccattaatgtaagttacctttttaagaaaaatagttatttgctgagctagattccgtaaagcagcaatgtctattacagagtattactagtcgataatttacccatagggatggcaagttttttccgagttcattatggtaaatgctgaaagaaatgaatgttccaagaccacagcaattaaacaagatacgagtaatatttagttatttactcccttgttactcttcaaagtcatgatatcagaaatcaaaagtaatatttagatgaaatcatgaaacagatgtgctttattaacttgcaacagtaaaataatgataaattagaaaatacaactccagtcccacttgttacatacagaccacaactaaaaaaaataagctctcaaagaagcttcatttctggcaaagaatacacctgcaggattattatagacttttgaacaatataaatagcaaatgaaaatctccacaatttggccccaatataatgactctttaaaaattcggagtgctccatggatatgaagccacagatcccaaagcatcaaaaccaagccatggcagaacacaaccgctggtctacaggtaatctacattgacatttgatctcagcccgcttcaagaaaacgaggcgcatcaaactaaacaaggttgatggtgaatgatacatatggatggggatctgcttcagctgccaggccagccattgctcccacttcatcctcagctttccagtgaacactgcaatcatacgcataccaggaaagcaggaatgaatcacagagactactaaataatttacctgcactgcctagtagtagaaagcagttgcactaacattaaaatttcaaataaaaacaaaatatgaacgcatgtggccatgactgaggcggtacattgaaaaagaaaacatatcattggtgtttagatggtctatatgaaaggatgcaacaaactttacagtagaaccaggacaagctgcaaattgctaaaaacatcattgtcaattagtcacccaacagtcaaagccataaagttgatgaccagagattgtcatcatgtgttcgctaggttgagtttctaaaatctcataattattatcacttagaaacgaacaccataaagtggagtgttagatgcagattaattacctgttcccagcagtacaatttcgttcgagaatagagcgtactttcttctcacttttctgagatggagccaaaacacatgcctgagataaaccaaaattaatcagtttcaatgacatgcgaccatttagataagcaatataatgaaaaattagcttaaggcctaagtaccaagaaatttggtggcaagccatatctcaatatgctctcagaaaatacacgtacagcacagaagtgcatccatgagctgaacacctgttaagacacttcatattagtttctgcagatagtaaaaagtttttcagatgagagtttctgcaaatagtgtgaatggctcagcaataggttagtgcaaacaaacataggtatgggagcaatactaactgtattagtataataaattataaaataacgcttataatagaggaagaccactgtacatctgaatcaataagctcagcaatagaacaaccaaccacttgtcctcaggatttgagtttttctcttttattattttcgattcccaaatgcccaatcagggtccaaacaagtgtccttgcagtcctagggatctagcccgacttctcgagacctttggttacacccccttgccagctgatcaaagcacttgttagcacttgagattttcactggacgatcatgtgatcaacatgtcattttttgtgaggcttaaggctttaaatctgatcaaacctaagccaggtagtattaaccggttatcaactatattaaaaaagcattcattataacacattgaaaattttctaaagaatcgagatggttcgactggtttttttttgctcttcacccgaacttgatttcgatccaaatgcagcttcaaattgatagttttaaacttttaatcaacgaccaagcctagaactgtcaatttgggacttgtacttgtttacatcaagtacaaaaggttccaattctcattcctggtaaggaaccaaaaatttcagagttctttgcggattggtgatgtgcattacagggaaggaatcatccattttttaatggaaaaggcacaaagcttagtctcatcaataaagttttaatttcttactagttatttgaagctttgccttgattccagaaataatcatgattcttaactagagggtaaaatgttttctgtctcgcttgtatacgcattcacctcatcggctcatctgcagacctactgctaccaaatccttattatcagatgtgatacatcccactggcttcctaatcgaaactccattactctgaataggggggggggggggaggggagggaggaatcaactcttgtttcttgcagcaaaaaaccatatacatacatagatatatatatacctttctttttagaaaccttgacaagtttggggggggggggtaaaggggacctaaattcgctaagggtaagaaccaatcccaagacctcttgaaatcgggagagatgctctaaccaccgagtcatccgtcactctcatgcatatatacatatctttctttcttctttaggcagttttcctgggagcctaaatctttctaaagcaagtcataattttacgattgagcacatactactgtagataccacttatcgacacatttggtgtcatcaactccccacctagtgttgcaaggaataccgtcacttggatatgtggaaagcatacgggggcagggatcccttaccttgagtgcagaaaagtaggtctaataataaattatccactatagttgaattcttaatgaacaccatgattattttatataatgggcccaaacaaaaaaagtttactttcccctttaaatttttaccatatgttacttagagatggggtaatagtgtccaagtgttgtcatggctgaaaatttaggacatggtaatgctggcctagaatttgataagggtgcaggtgcgacattcatagattttattcataattgaaatagacttcacgagcttgtcatgttacaaacacgtaaaaatttcaggttgatttgtttgctagttcttgttaaaattatggcctcaagcacatttatgagcatacatcacttacttttctcttttcttttcctcacctttcctttctgcagatatgcaattcaagatgaaagtgataggtaatgatttcatacccttatcggagtgctaagtgttttgagagtcggaaaaaaaaacatcacgactcccaagtcccaccgtgccagattagttcgaacatttgtcgaggcacaaagatcaaatataagttttcattaggcgattcattgctatttcaaaagaaaagtctatgtgataagagataggatctttgtaatgctagtttaaagaaagtagatgtgtaatgagataacgagttcaaaatgggagttgaaaaatagtaagaccatgccaaacaaaaaggaagtgttcaaactgttatgggactgcatcactaaaatggttaataatctacaacgaatttatacatatatttgcaaggaacacgccaatgtatctcttttgcttccattttaacacatatttaagaataaagtgtcgttaccatggatataggtagagaaatgcccttacaagttacaagattacatgcaaattccttatcactatcaacaaacaaaacctaaatttattatgtatataccgaataaaattaataatgatccacaatttagatcgataaattcaattgtgaatttgctcactgatgaacaaacttttggcaaccctgtcccctacccacaagctacacaaacaagggtaaaatatttcccatgacaatccaacattccaagaagattgtggctgatttggtgagcatctattattagaaactttaagcatatgaaacagatttatatcttctgatctgttagctattaacacagacaatttgctatctcagataaaattaatttattaattattgtttttgaaattacaatcatataatatgatatctgaaaactatagttactgaaatggcattatttaagaagcaaagatacacaggcaaagcaaaaggctcatagagcacatcagaaaaagtttcaaacaccataagctacagccttaagtattatgcagcggaataaaaaaaatccgaaatcctagatgaaacgaaaggatttcttcaaacataaataggatgacttccagaaagttacctcgccataactggagtagcaccattgcaaaagtgcacttctcattgtttcttggtcatgtgccaatttctccaactcttgcttccttgactcttgtgtttctgggtcatgttcaaaatctcgaatctgaattgcatttaagtataggagaaatgaggaaacccaaaactttcactagttaaagagaaatttaaccttgctttgtgtaaattaacatgctcagggaattatatttccattcttgaccgacgaagagaaggttaatgaagttctaaccaggaaaaacaggtgaaaaggaaaaaaagataagaagtgggagctgaagcacctgaaaacctctttcacgagcttttactctgaagttatcagcgacacggctaaacatagtaacagtgtacagggcgtattcattgtcctcatacagctttttagatgaccttgggacctgaaaaagctcaatttaagtgcccataacctagtaaggtaaggaaaaatattggctagtaggaaaaggatataaaataaatattgtaccactagatattatatctagcatgaatcacaataaataagtgcacctaacctatgaagagagtataatatatatgtagtccttaccacatagtcggtcaatgtctcatagcttgataaccagtccttctgtgagaacttggaaacaactgacaggagcgtaaccaaatgctctgatgcaacaacatcctctggctttaccaagttggagagatctctcaccgctaagctgagatgatcaaaagcttgtcagcagacaatatgaccaacagttttctaaagccagagagcaataacaagcttgactggatctttaccttccactttgtttgcggtttattgcattaagttgactgcggacattgttatactcagcaacacggacctaccaaaagtaaagtttcagactcaaacaatcgcttggaacagtaatcatactaaaactagtatcagcataacagtcaatatattaagagatttccaagatcagctaacagctgatagccatgaatatcacctatagtttcttattttatacttcacatgaataatttggtttgtaaaatcttgtgcttattaatcattatttccatcagcactgatataacagagttagtatccacgtcttaccttatcaggttcagataaattttgtaaagaaaccaagcaccagatggatctaattcaacgtactctattcgtgggaaagggtagaaagctgcatatttaaaataaaaatcctgctaagtgctatgtaactccagaagttcaataattaaaggaagtcgtaaaaaaagttaaggtctgtgaggccaagctttagtttttaaaaaacaggtcctctgaacattatttgaggagaattatgggatatacgatgatcttcttgcagaagtatgaatagactaaagaaaataaaagatagttgaactttatgagcacggcatgggtgaaatacttgtggtaatgaacaagacacggaaggcaaaaggattatttagaaaggactagacagcacaatcgaaggcctgagcgacgattagagatctattctgaatctgtccaccttcaggattgcaaccactcaaaatgctagtattttagcaacaattgctcttttaccagactaaaactttatgttaattttgttatgcaaccacaaagacgcgaatcacaaagtgtaggatggcaatcttaaatcttttatcaatagcttagttgcatatcttcgcatgctttcagagttagaatttcggtatcaaatacaatctcaaaggtaacagtaaaaacagcaaccctataccttgaggtcatcttcaaccttagccacaaaactatgaattccatcaactacttccttcaaaggcgacatagtcggatattttgcttcatcccaaacaaatctacaaaaaaaaaaaagaacacacacaaacgaaatcacaaacagaactccaaattcatagtcaaacagtcaaaattcagatccttcaaaagacctcaccttgtaagataagagtcaattggaactccatcaactgtcaaagcaccaccatcaacgcctgaagatctctccaattcatcgatctgacgcctgatcttatgcgtcacaccttctacgaatgcattcgcctacaaaatcatcaaacaattcaggcataaaaacatcctattcaattacacattgtcgaaaaaagtgcttaaaatcaaacaattataccctgagcagttcatcagcgagtgcgaggagcgaatctagggtaccaacacgaagattaggcacattgaactgcaaaattaaggaaattgacatcaatttgaataaagaaaaaaacataaatctcgcaaaaacctaatttataaatcttgccaaaatctaaaagaggacagagaagagagatactcggtaaagaggagtatcgaaggattgtttggagacggattcttgcaattgagaccataaattagacgcagatgattgcacgggaagagacaccatccagtatctcgtcgccattgtcgatcactattttctctctattctgtgttgtactgttgttgttgttgttgttgttgttgtgttgtataaggactaaggagggagaggagagatcaaagtcgagagtgatgaggtagatgacacagagctggaaaactaggagatgcaaacacgacaaacttgtaccaatcatcaattatttaataattatttaccctctaatctctatgcgtttgtgttatactccatccgtcttctattactttacccctctattttgtacagagagttttgggagaaataatattgtaggtcatagaaagaagggtaatgctatatgcagcccttagagttgaatataagcattaaatacatttcctaaaatggtataaattctcatatttatgataaaatcacacataaatcgatgtaattaatgttttatttttcaaaaactttctcttttaagccttttctgtgtagtccttagggctgcatatagctttttcctaaaaagaaagagaaactattattttatattaaagtttgaatgtatgtgtgatgaaaagtttgtggtctcattccaaaaatagcaaaaaaaaaaaaaaaaagggtaaactaataagggacacctttaaaaggaatacgggtaaactaatagaggatggagggagtattaacgttttctctcatttaattattaattagtgttacaaaaaaattatttgaataaatatttataattatttttatatgtttatcttaaattaatggtttgttggttttattagttatttgttcatcattatccaaatatagtattgaaagaaaaaaaatatagagcagaaaaaagcttgtgctcaaataaaatcaaaaaatttgtataccaggtttaatcattaaatattaataaagtgaaagagtttaatttatataatacaaattaactgcctcgtttttggtatgttgtcggacgggcttgaatagtgctcgggcggcgggcggtatgaacaaagctttcgtttttcaagattttcggtaatttttccgtttttgagatattttctaaattaattgacgattattgatcattttaatttagaattttcttgaggttattaggattttatatgtcccaattaaaggaccctattgggtggttaaaacttctaagcttagctttttgtaagattgcttgtaattagagatgacaattatccatgggtgagtggattattcatccacccgccccgaataaatgggtgatcacccgcggtgaagcgggtgactagcgagttgtggatggatcgggtggcagttcgggtcggatatggatgatatttttggatccatcacccgccccatccatccattgatatatatatatatatatatatatatatatatatataatattaaaaaacattattttttgtactaccacatgtcatttaaagtaattgaaaaatacttaaatgtttgttaagggacaaagagaatacttacaattacttttaagtgtgtaataagattgatattttgtcactttattgttaatttatgagactatgattaattttttatatattaatttctttaaaattgctaagtctaaaaaataatttttgttcctagtattacccgcttcccatctgctccacccgccccacatgcgaatgatgggtggaccgaatatggttgaagtttttggcgggtgatggatggtgtggatggagttttgggtcgcggttgatggggcggatggaactccacccgacccatcttcgattcattgacatccctacttgtaatcctctaagtatctccattgaagattattgaaaagttctagaatcccccacctgtggactaggtcacatttaccgaaccacgtaaatccttgtgtattatgttcttcttctttattactttctcccttatattttattgttgactattgttccacactaaatcaaatacaacaatgtcctaatacttaacaataggtatccaagctaggttttagggtgtttatagaaagtttaattttttttttatcatgtcaacaatgaaattcgatgttaagaaatttgataggcaagtgaattttggcctataaaaattgaagatgaaagccatcttagttcaaggtggttgtcataaggttgttgacggtgtgttcaaaaaggccacggctatttcaggagagaagtgggaggatatagatttgaaggctctatctacaattcaaccgtctctctctaatgaaattttgagaaaagttgctcgggagactactacagcaggtttatggttaaagttggagtcactttatatgactaaaagtatcaccaatcatctactactcaaaagtagacatcaagatctttgcttagaagaaggcaaaccgctcgagtctcatttagacgagttcttcaataattaaggatctgcaaaatattgatcataagatcgatactggggatatggctattaggttgttatgtctttaccaccttcttataagcatcttagtgagaccctattatatggtaaggatgacttaagtttggatgatgttagggatttcttaaatcaaagagatttaattgacaataagtaaattgctaaatctagcagtccatctcaatctgatgctttattggttagtgggtggtggtgagaataacaaagggaaaatttgtaactattgtcgtgtaaagaggcatatcaaatatgagggttggaagttattgaagaataaaaattatggtaaagtccgctactgcaaaattcgttgacttaaattttgatgatgataatgcactttaatttacaactacaacatttgtggactgcggtttctaccaatcactcctctctcttttttcttgacaacaagtacatacaaacaactaaacaaaagactaaacattcaatttagaggttgaaccaactaatggattttgttacttgagggggaagaggaggtaacatatcgggcaagtaatggtaatgtattggtgagaggttgaaccaaacatagtgaaaggaaattggtaattaattctgtttcttggagcctaaaaatagtgaactaaacgggctctaataagtaacctcataatctaatccattaataagtgacctcatgagtcctgagtaaaaggttaaatacaaaaattaagcaagaatcacaattacatgacaatcaactaagaaaataccgacttattttatactacaacactcctgaaaaaagacttgttttgtgttagactttcatatgaccccttttcttccttctcaacctattttgctacaacgttttctatacctattagtttgttggattgggaaatcctctatggacgttcttctaatcatcggatgtatgtgttttatggcaatgattatgcagctatttccttgttcaaagcctatctgagtgactatttcaagatgaaggacttgggttctctcaagtacttcttgggcattgaggtgacccgtagtgcttctggtttgtttctttgtcagcgaaagtgcactcttgatattattttagaggttggtttattaggtgccaagcgttgtggcgtccccatggagcagaatcgtcgtcttagtcatgatactagcgccttatttgatgagcctgagcggtatcgtcgccttgttggtcgtttcatttaccttgcggctagtcgacccgaccttgcttattcggttcacattctatcccagttccttcaggctcctcacatttatcattgggatgccgccatgcgtgttgttcgttacttgaagggtacaccgagtcacggtattttacttagtgccaatagtgatctcacactgtagggttggtgtgactttgattgggctgctggtcccatcacgcggtgttccttgtctgggtggctagttttcttggggcattctcccatatcttggaagacaaagaagcagcgcaccgtttccttgtcttttgctgaggctgaatatcgatcgatgacagctattacctgtgagctcaaggggctcaaggggctcaaggggctcttacttagtcttggggttcatcatcgcaaggcaattccccttttccgtaacagtcagtccgctcttcatatcgctcataatcctgtgtttcatgagcgcacgaagcacattgaggttgactgtcattttgttcgtgatgccatcaaggatggtttactagctccgtcctatgttcctaccacaacacagttggctgatgttttcactaaggctcttggcaaatcacagtttgatcttctcatatccaagttggggatttgttcaccgcatgctccaacttgagggagatatctttggtatcttgagatattcttgtatatattctttcctatcttttagggaagttatttgatcctccttgattacctcctctttagaggattctttcctatcttttagggaagttatgtgattgtgaatgagaagaattcaagctttgttgtgcctctatcattttgtcaattttacatacaaacatatcataaaaaccattgcaacatcaaatccagcaaaaaaaacttgaaattttcacaaacccaaaaggcaaaatattaacataaaaatgtcaaatttgtttcgtaatcttcaaaatcataccttaaaatcaatgtctggataattgttagcaagaaaacgagcaagacgttcaccagtctcctaactattgacccgagcaacccaccattgtgggcccaattgggccaatgtatcaagattgagctctttagtccaagaagcatatttttggaaatataacgacacttataatttgaatcggcttattcaggagatacaaacatttttagggacacatttaataaaataagagtataattatgtgattatcgactaaacctttgtttttttttgtggtattaggttttgtgatagcaggttgatcaagtatgatctagtaactttgtacaatctagccacctcaaaaatctagctattatagtctactggctaaatagtattgtgccattaatgttagcttacattagagatgatcaacatggacacgacctaaatatgggtgggttttggacacactttttcggcctgtggtttgggcccgatttttaaattagaggtatccaacagatcacgagcagagacttgttcaactcgtgctcgctaagttttgagtcaagttgagctgctcatgagcagctttagagttacggttcacctatttttaggcatttgattattatattttcttttttttacaattttttttccttttatactagatcattatacttttattgagtgttaatgtaatactactttatttcaaagagaaattaattgaaaacaattaagttgtgtgcaaggttattgagttttcagctcaatcgagcgagctcagtcaagttcgagctgctaaactcgattagcacccctaagtccatcaacgaaatatcaattaataaccagtgcatcaaaaccaattgaaaaaaagtttcactcaaaaagcaacattccgattctctgaaatttaaccatatccatacaaaatttagtattacaagtaaataaaatttatgtatatttgctggaaaattccccaatatataccccctatgatgaataaaactggtgttatcaggctatcaattatcatctctcaataacctcacaaatccagggtaatagctgtaagagttaacatggttgcaaatatcagcaaaggctagaaatttcctgcagtaaaaacagaggggaagagaaaaatgacgaagtgtgttaaagggatgtgtaacaagtaactaaaatggcatataagcttttgtttctatatttcttggtcgaaattccaatctgatgcttccacaccccaacctcagttggacaaccatttacaaatactgtgagatgagccaggtaatgatcccggtcgatacaaataaaaatacataaagctaagaaattagcaatagaggatacatttgaatacagattcactagaaaattcaaattatcaagatatctcttctagtcttatctgatgctggccaggaatagtctgagatcccgtgctttctgagcctgttcaggtgttatttccatgtccgaatcactcagatcaataatatttactaggtctacattaccttgacacttggagatgtaccgtgtctttagtcttggggacgggcttatgagatcaatcacatcagtatccatactcatgggacaatctaaatggtgatctgaagtggatttgttattggtgttgctggcataatcttcggtgtcagaaattgttaaatcaacttcaacactgcttcctgatgttgatgagctagagcatgatgttgatttgcaccttgcattgtcctcagactcgacgttaagttggtgatcaaaagggggtttgttgttaatgtcgcttacataattatcattctcagaaactgttaagtcaacttcaaagctgcttcctgctgctgacaagctagagcttgaggttggtttgcatcttgtattgtcctctgactcgaggttaagtaatgggctttcagttctcaaatcaatactaataatggaagcttgggttggcttgaatcttgaattgttctcctcatactcaatgtcaagtaacaggttttggagtcttgtatcaacattagccacggaagctgtgtcatctaatttctttgacttgggtttacgacgattcagtttctttatctgaactttcctttccacaaattctgcaatcttctcaggacaagcactgtaagaaatgtgatagccattctgtcagctaaacatggattaccttagaacacaatgagtgtaatcaatacatacttatctcctgcatatatgagcatgcctttctcagaaagtaccatatagattaataaaataataagccaatgcaacccatgatactatgcaactgaacatagtctgtaagtaggcaaaatcccttactgctcaaggggagctaccctaatatgctcttaccttaccttcgttaagaaaaaaataaacaaattcccaaacaacaacatcccaaaagtattaagaaaattatactctctccgcaggagagattaatagccacgtcgtccaactccttgtgagttcaggattgacgatatgacagaattaaactttataatatttgtctaatatcttatcagttcttcatcaattaatttaagtagtggcatattaagaaacttaatcataaatctaaacatccttaaataataattaaagtatatgtggcgacagggagtataatctatgaagtatcatctcacaacatcctacatctatgaagtctacagacgatgcaatccaattattcctgtgctaaagaaagggaatctgctctgaccctggtaggaatttacacatttacagttatttcaacaggcaggtagaatttaaaaattatggatctataattacctctccaaaagatcagctggtactatggatgttttaaggccatcaaattcttcccatgaaacttcaaagcattctctaccttgaacttttctatgcttgagaacttcagatataggacatctttttggcatctgtcattgagaaaaaaagaagaaagaattcaatgacactatgatgctaacgcatgatttgtctaaaaggggaaatcttagcgactccttctgcaggtagtcatgagcttcctgcatcacactcttcagatgtgtaatattattgatgccaggtagagtttaaaacagaaggaattttaggcttgcaccagacggcacaagatcccactagtatcggcattagaaaacagtttatgtcttttaatttcgattgaaactcttcatctggttatatttccacagtgccgcttagtcaatgtcttctatgtataatgccctatattattttttcttttaattttgattttgaaattcttcatctggttatatttccataatgacgcttggtcaatatcttctatgtatgatgccctacagaatttttactacttcacctattacaatcataattgtcgaattaaggggtggtgcggtggtctcctcacatgaattttgctaaacttatgtgaacttgttggatattggaattgattcgaacttattgaagcttattgtataacttattagaacttattggaaatatttgaaattatctgaactaattagtaattatctcaaacctcataatatctcaaattatctaaattaccgaaacatgatatctcaacaaaaagctttttgaagtgagagtgggactttggagagggaattaccagttccctaccaagtactttacaaaaagaaacaatgagcagattatcaccaaagggcaaagagagcttaccatgtgcaatggaagtgtaactcctaactgtgaagaagaggaacgcaaattggcaaatctccgcagctctctttcagcaatcttaggaaggatgtactcatctgaaattggttcaacagaagtataatctcaacagagcttgcacaccagttttctataagatctagagacaacaaattacaagtagccactttccttgaacattaaaattaaaagttcaaaagagcaggaaattttggcaacttctcaaaagaagtgcacgcaaagggctgttggcgtactaggttttaaacaatgctgaatgaattcctctgttttttattatttctaccattttaactttcacgtttaccattaatatatttgaaatccattactataaaactacgaattataaaaaggcaaacattaatacacaatgagactaattcagtaacatttgacatgataacatttctttttatatattatcaaacaatatggtcaaagtgcgttatgtgagtagtgcaacacttcaatatggtagaactcgaaaataaacagaaatagtatgccactaattatttgagttactgaccccattaatatatatgagagggggagaatattagataattaaaacaattgctctagctacacattacaagaatgcttgattgataatgatggaaatcttgggatttcaagtctttaaacagtatatctctagtcaaatcaccacttctaaagtgatataccaataaatgcatcttaatgcttacattcaccaaacacataaatttttagacatttaatcaaagcaaacaaagacactatcacactactaatctaagtgatactgctatactgatttagggaggaattgggaagacaggggaaggggagggggagggggaggaaaaatggtactgctgaacttatttgcatgatctattgccatagcaaaaacctgttttctctggaggccaatcaaagaactgagagcatatgtgctgaagcgcatcacgctgaaaaggaagcacagctagaaccctgaaaacatacaagcaacataattatcttctggtcttgcattaaaaaaagaccttaagacacacaggaggcgtgcaacagatgaatagacaaagcaggtcaatcggcgaacatgctagtacaggcaatatagcaaaagtgtgtatacttttgtgtaccaaacatccgtgccacaaaaacagcaacaaggcatatgttgtagcaggaaaatagaggcgttacctatacacatgatctgagtcagctgaatgacacttcggcttcatatatgcttcaattactgacaagacttccttatctttttccaaaggaagctgatgttctgagggaaaagaatcaaaaaagttcttaatggatttttcacatgtttattgcaccacaaacattacagttatggaaaaaagatacatcaactaagactttgacagacacgtcaaaagtaacgattacaaaatgccatgacaaaattatatagccgaaagtgacctagaacaaataggcctgtatttcacacacatatatatattaagcatgcaatggtcaggtttaaatgtcaatttgacccaccagtaaactttacttgttgatctgcaaagttttctttcccaaggcactcaggatactgtccatgcttcttcgaagttttcaatgacttcaaaaaagataaaccatctgatgcaacatgttgaagaacaagatcttcgctaattgatctaacaacttggcatgctgaatcctgtaaccaagtgaagggcaatggaaccttaaggcctcataacttgaaataaataatagttatcactgctctaccttcaaaaaagcagaataaggtatccggacttactggtccaaacccgcgaactccatgagaataatcacttcccaagagaagggctagggcaacctggaatgtacaactaagttatcaactatagccacactactcaatcagataactgatgtccgagcataaacaaacaactcaccagtgaacgccttccaagtccaagtttgttctctatgtcagtcatttcgtagcaaacaatgtaccctcctttttctattagtcaattgaaagcattaatgttgttgtaaaaatagctgctgagtgattatatgaagaaaaaatcaattaaatttctcaccaaggcatatgtctctatacacagttcttgctccaaaaaggaacacatctgaatcagaagtgaaacatccatcctgtaatgatataggaaactcagctttatagcaattaaaattgcccttcgtccgcacgaaatgacagaattttccttttagtacaaactacaaatatctcatagagctagtgacacaattgggaaaacatatccactcttattgagtgacagcatatatcgaaaacactctctagttagcaaagagaatgcaagtattagagaaaaatcattttacatgcggagcctcctgagtaacacacaaatcatactatgatttgggttgtggggccagctagcacgcaacaggaatcaaacttgtctttgggtactcatagaccacgaacaaaatacaccccacttaactagaggtctaaagacaataagacatgcctaaaggggggctacttctagaaaatatttcattctagcaattggccttttcttcatagacttactattaaggcaactaaaaaacactcatgatggcttctcttataataagttatgaataatatcataaggacacgaaggaagtatcaccataacacaaaagcaaggaaaaggattaaaaagaaagataactcttatactcgccccaacatagtggggagcaagaaacatcatgaactcaggctaaattatcataaattatctaatcatgaaacatcatgaactcaggctaagcaaatcataaattatctaatccaaacaaaaacctcatcaaaccaacttgatatgaagatctcgaacattgtatcctaatatatcgatttctccttgatactccaccaaattgccaaaggaggtcgcctccatatttcaataattcaattatctttcaaccttctcgtttatgctactgaaacatttttaacattgcttgagttatccagataaagaaattttgaatgccacaaagaaagaagattattggttgacggcatattatgttagcaaaggatacccctagtagcaacatgaagtacattaatttagtcttctatggggtctccctaattatcatagctcaagtaccaaaagtccaaaactgcacatcaaaaggagccttagacctcacaatgtttttgacaagacaaagaaagtccacaacccattcaaacatgatgtgaaactgtttaagtcaaaggatcaaccaccatcacttaatggaaacatagaatcaccctgagctcaacatttatctcaaagacatggaaaaaactgggctttcagaattgcaaacatttacggagaaacctaggaaacagagtttttggtgctttacagttgagatatacaactttctatatatacatgctaccatgtcttaacaactgcaaatatcaaatgttacatccaccttcaaagaaagtgagacaccggatgaaaaaggaagatagtcttcatcccatatttcctattctaccctttcacttctttcacatgcaactaacagttaatcagccatatgaacctcacatgtattatgcatctttcaaatccctctagtggttatgaaaactaaaagcagaaagtaatagatatgttgcacatggcaaagggtagtttcagtttccaataaatagaaaaacaatcataaataagtaaagcttgaaatatctctattatataaggcaacatatgggggacaccaaaaaatagaaaaagaaaaaaaagaaaaaagaaagaaagaagataactaattgtttcatttgaatgaaaaaaggggggaaagtaggatatttaaactcaacatcagttttttgagaaaataaaatgtaaagatagtttttctatccaattaattttattttttctactttatttattatcacgcgttagcacgcatcgcgtgcatgtaagactagtctgctagaatggaagtggtgaagcatatacaaagaagaaaaaggtatactactcacacataatgattctgagtttagcaaagcacattcggcttcagcttcctcaatcctgaaacacatacaaaaggcgaagtttcaaactttacaaccaagtctaccatcttttatatcagacctaaccatatgacattgtctcacaatcgttccttagacttgaagatttagtctacaaatgttggggtgggagtcaaacatatgctagagatgacaaaatgtaacatacggtcccagataattcacaacttcaatcttttttctgtaatttgctgagcactagaaatctctccatataattatagaaacacatcggtatcttaattcttgaattttaatacatgaaaaagagggagaagagaaaaaatagtgttaaaatctagtagtagaagtatgtctgttagccagcttaatactagctgaactactaaaactcactgttaaagctgaaatcagaagaagaaaaaaacattacccatccaagcaaggaacaccaagcgccatgccaagggttttagcctctctaatcatacaagagaattcagaacccatatttcttcgcaagggaacaagtttgtgtttgtctacatcatcttgtgtaacctatcttgattcaaaatgttgaggagaatcaatgacagtattttctctttgctaaattctaaacaaaaagggagagatcaaagtacatgatatctacctcatttactgagtttaagcgctttctgtatgtcgaaatcttgatagcaggaatagctccatctattagacaacaaataaaatgcgaattaagctaatcctgaaaccagtccttgatgagttcaaatcattttttaagtcaattagttgtacatgagtagatcaacagaagtactaaccctataattcctttcaagtcttaatgccttatcaatgaaaatacagagatactacaaatccggaaaataatagaaggccataaagagaacacaccagttacaaaaataacactacagttcaacgaaatgagcgccctcaatcgatgaaaaagtcccctaaggtaaagcttctctttcattgcacagtatgttctattaaccttttggagctgcaccatccaacatgagaggtctatgcacaccctcttgttcctgtaaacccaatgttcaacaaatatgcatcaaaactttttaatgacctgataaacactaaattcaacatagatacttgtatatatagcatgaaactacacttcttttggacccaaatgaagcacaatatagcccaaataaaaggaaaaaaaaggactttgactaaaaaccatacaaatttaatcatggtagtagagttataatgaatccataattatatgaggataatcaagcagttagtgccactacaatattaagaacttgctcttataaataggtaattggaaattattcacaaatatcagtcaacccaacatgatttatttattaaaaaataaaccttcagcacaaacagaaatagatgaaaattatcaacaaaattgaacttaattatcccagatttagcacaaatgaatacaaaaaaaaattaatggaaactggaaaatgattaactaacaataaagtttgcccaattatgcaccaattaagtttctactaaaaaaatattaaacaggaggggagagaaaaaaaacaagaaaaggaactatctttagaccatacaaacaaaaaaagttaactaaaaatcaaattggggaataacaagcaataaaagcaagattaaaaaagaagggagaactcactgaagatggtgaagtggtaaagttttcttgcaaggctccaagatatcccacaaatttttgacacccataaattctgctttctttcactcactaaaatatggtgaacaattagagaaaacagtgattagaggagagagaaaagatgaagaaaacaaacgttgggggtttgaatttggtatccgtttatttatgtttcaaaatatttatggcttgcatagagaacgggttgattgctgaaccgaccggttcaaacatttgaccacctttgggtttattttgctgcctcatcatgccattgcgatcgccagcagtcctggccaatctaacccattcagcccagcctgtttctggggccgtgtaagttaagtccgcgaaaagccaagtccaatccaactcgaactgtaaaattggtgggtggtttgtaggtcaaattttttgaacccaacccacaaaagcccgcaactaaaatcgcccaatccggtccacgaaattggtccaacacggctcatgaaccaaactaggcctgtccaagtaattattcaaccaaattgtatatattttaaattatatattttttaatcaaattgcatatattataatacaattaaattcaaaaatatgaaattattcattaatattaataattgtatatattttaattttttttaagcgttttatgtaacaataataaacataagtgttatatacagtaaaaaaaaaaaaggctaaatacaacatttaaaattatgtctaacttaatcatggttaattttattattttttattataattgggcttcaactagaagtcgctttaataaataataataacagtcattcggtgagtatgcaactgtttaaatttcaaatttattgtcatatattattcaaagtggtaggtcatattttatatttttcgggttgcgattatatgtactacaatgaggtcatttatcatagatgaccgcgtataagggggtcatttgtcatagatgatccttccaaagcggggtcatttgtcacaaatgaccctctaaagggtaggttagtctttttaatatattttgttgtatttagccttttttttttttgctatatatagcacaccccataataaattattccaatgaacaattttggaaaaaaaaattcttatgtcgacctgccagcccgctaagcctacgaatcgctttctcgaatcgtgaaaacctgtaacagaccggtgcgggccaggatttttcagcccatggaccagcccgcccaaaccgtgtattttacgatccgatcctaggccatgaaatttcagcacggcccaatagggcccacggaccatcccacccaacctacaccagtggccatctcgggtattgctaattactagtacttccaagatgatctagaagtattttttttttaggtttattctatatagtaccctacattttatgataaattaaaatctctagcctttttagatttttcacattatatccctaaactttctaaacattacacctaatactcttacattaaatagtaagcaatagattttggaaattttttaccatgtgggtaggataagattgttgagccattttagttaactggaattttggggtataaatgtataattcttaaggattgaaagttgagtgaggtttggggtatgatttttcattagtaaagatattttgtgtgacgtataaataatttaagggtaaaaaatggaaagttcaaaagggtaggtacaatgtaaaattttgtaaaatacaaagacaatacattaaaaaaaaacgctttttaagatgtcatgttggaacctatctaatttgtataggttctatcattttaatattttatatttactaattgcactaaaaaaaattaaaaagacaaaaaatcttgtaagctcccaagaaatattagccaattcgaagtacacaaaatatggaaagatgaggaaagaaagatgaagcacgttgtttgatattcatttccgctaatgatatagttcaattaggctatgtttagttcacctgaaattttctgatctgaattgatctgatctaaactgatctgatctgaactgatctgatctgatctgatctgatctgattacaagatcttatcttttagatttttataaatatataagaaaaaaaatatagtcatgtggggtcttgtttgattcgtctcaatgagtactttattaatattcaattattataatttttactaatatgtaatgaaagatactccttccgtcccataatataagtcctgattctatttttacgcgggaattaaggtaaagtggaatcttgttttattttggataaaaatattcatttttattgggaaacacttacattattatatctttgtaacaaaaaataaaaaccgaacattaatgttgcatggtttaatgtgtagaggagtttaatagggtagaagattccaatttgtcattaattatagtgcattggaagttgaaattatgagggcattttgagaataaaattatcttcatgagggtattttgagaataaaattatcttcatgagggtattttgggcataactattgattgaaaatagaaataggacttatattttgggacaccttataaggaaacaggacttatattatgggacggatggagtatttaatagtataatgatttttaaatataagcatgatctgatctgaacttattttttttgatctcatctgaacttatgttttctgatttgatatgatctgatctgattagatctgaaataagcaaaaataaggtgaactgaacatagccttagagtatgcgactatgctcatttatgtctcaaaaaaacatgccatttttttctcataaattttgtctctcattttaaaagttgattatgctttatgatctattttgacaaatgcaccacactcatgacccaaaaaataattaaattagtaaatgtgtcaaaataaaacaaaatgaatgtctatttataaataaataaataaaacatgaaaattggcgatttttttttttagatttgaaaatttgaagttattcagatacaaagtctgaatatcaaaacaaataaatatgactacccaaccacatgtcgacatatgatttgattggagcgctgctctgtgcactcacaactaactagaggtgatcatgagttgggtcgagcgttggccaaaaaaatagtccgttttgggacaaagttgtgggccgggccaagcttccgatattttgggccgacctagcgagcttttcgagccattttgaaagaaaggtaagaatattttggaatatttgcgtaaaattgaggataacttaatccaaataaattgacgaaaaatgaagtaggtacaatattttaatatacccaaaataaaatgtaagcactatattatactccctcaaaagatgaggagctaggtcatgtggtagagcactcccctgtgatctctgaggtcatgggtttgatctttacccccaacattatgttggggtatttccttagcatgctttgcatgcattaccagccaatgtgctggtatttcctacaagactagtagccttggtagagattaagcccttgtgctgacttaatttcccaataaaaaaaaaaactatattatactccctccgtttctttttaatctatatacttttttttagtccgtttctttttaatctacacattgttgctttttctatattcggtaacatatcacatctactttatcctcttttttcacctatgtcattcactctttaaaattttaacccttttttatgtttctttctccacgttttcagtttctctctcatacttttgtaattcctttttggttctccctcaaagtaaagtgagtaaattaatataaaacggagggaggaaaacatatggagtaattaaataaaaacacaaggagtaagaaagagaacatcggtgaactgtgatgttggactcatgagtcatggactcatggttcttttgaacatgtcgtactttagatattttgttcaaagtgtatttgttgatgcattagatattttatccacagttgtgcacgtatcctttatgacgcttttctctctcctcctttctttcataatttctgtaacacatctgtcattgaggtattagctttatctctcctcttcctttgatttcattcgaatttgatcataattattcaaactctttcaaataatttgatgtaatatgattatatttgttggattttctgcaattattgcttcattcctccattctcaagcctcttcttgccagttcttgctgtcaaactcttcaacttgatttcattttcttagttttttaatgtttatctcttgaaatatttaattttatttacataataggaaactaaaatcacataagaaaatgttaggaaaaataaaatggaaaaaagctctttaatttcttcaaagaaagcaaaaaaaaaaggcaaatgagaagcaccgtattgtgttgcaaaatactgagtagaaaatagtattagttcattgatgaaggattgtcatgaggtggctagtccatcaataattgacgcggccgacgcaattaccaccacaaacagcacctccgccgcaacaaacacactcgacatcagaactaggaatggcaacgggtcgaacttggaccggattatgcataatccgactccgaccctacagaaagtcggattttaaatctgagtccgactccgagatccgactttgaaaatccgaatccgaccctacctaaaatccgaacatccgactcgagatccgacccgacttaaaatccggacatccgacttaaaatccgaacatccgactccgaacctgatccgacttatttttcttccaattttttaatcattttttctgtgggaaaatcctatgtaatacaactggctgaaagtcgaagtcagattatacataaataatactacctccgtttcaaaataagtgcaacatttgcatagtgtttactattcacattttaaactttaattagctttggtgatttatattttaggaaaaacatagtcatgtgggatcttgttagattcgtccggatgtgaatttttttaatatcaactttttataatttttacttattgataattgaagatattaatggttaaaataatgcattggcaaacgtgcaaacaagaaatgttgcacttatttagaaacagaggaagtacattacataactaagaaaaaaggattgattgactcaaagtcggagtcggattcggatgtcggattattctatgagatccaactccgaccctcttccgactcggagtcggattttttaaacggagtcgaagtcggattacttttttgtcggagtcaagtcggattttttccttcgaatcggagcggactaaggtcggattcggattggattgccatccctaatcagaactactaattaccatcactgggttcgttcttttatgtgttttctctcacctcaagtaaccccaagagattctggaatttcctccacattcattgaactcgagggagaaagaaggtgagattttcaggaagtatataaattgtgcaacacctaagtaaccccaagaggtgattttcgctttaaaagaactctcttcaacgctatacattataacgtttctcataagctacctaaacactatttaaaagggatattccatttggtacctggcttttccatttggtaccactatttttcagatattccacatggtaccactataatttgattttcttctctattatagcattcaactaagtaaagtgttaatttaagttagaataggctagagttttacttcgatgtacatgttttaatttgcgttaaggttttagtaattactttagtcgttaaggtcaaagttgaggtcatatttgacaataaaaagacatagaatattatgattatttttatgaaaattttaatcgaaaaatagagctttaagggttaaaacgacaccctaaaatcttaatttattaaatttttgcaattgcaaatagaaacatgcaaacacaaacaaaattgtattcttgtttaaccattaactaacattttacttaaaaaaatggtatgataaagattaatattaaattagagtggtatcatgtggaattttaaaataacagtggtaccaaatgaaaaagccaaaaattcaatggtaccaaatggaatatcaactctaaactagtatttaggctcggacgatgtcccggattttctcttacaatttattagtagttaaataagtattctcatactcatttaaaaaagtcatcttattcattatatgtatttcaaacgttttccattcatatgtcatcattaatgttgattacaaaatcaataatggtatggtggagtaatggttggatttcttactttcatacttgaggttatgggttcgaatctttacgtaaacaattcttcttcttttttttactatatggtgaagtaatggttggatttcttactttcatacttgaggttatgggttcgaatctttacgtaaacaattcttcttcttttttttactatatgagaaagacgtgggtataatgttattggatgagggagggtgacacgtggcacatatacgttcttaggaacgccttttaatatattagtatagataatattccaacctctattatgtcaaatacttaattagtattttgacttggtcaaagctagttaaagagatggtattgaacataagggtgttctgcgtgttcataaatatctgacctggttattccgattcgattttccgggtgtccaatccgattttagtttttcggatcggaatttttcatcttcgaatatccaaaacatcaaatttttcggactttcaaatttttgatccgaaatatccattttcaagtcaggatgtccgaaatatcttatgatctaatctgatcagaaacttattttatgagtttttcttttgaaatttttaattttttttggataaccgggtgatttgaaatttcgaacatccaatccgttcttatccaaaaaaattctgaactgattcagatcatatttttcccgaatctaaaaatatcaaatcggttttgaaataaacaccctagtcgaacaggtccataattaatcagttgacaatgttatcaaacaaaattctaagagttatgggagagtttgatttacttgtgtctactttgttttttttataaccatatgagccacgaaggcgatacaaaatacaaagaatgggaaaacgggattcgaacctgtgacctatcgttcacagcaccttaatcttaactactaggccaagacatccttggtacttgtgtctaatttgttaatatgagcaatataatgttcttgaatgatttcctacaatgttctttttgttcctaggtttttttttatgttagtgtttctaataaatttcagtctctttaatggacagtttttctacccatatattggattatatatatctatccatatattggattaaatctactcatatgttaggttttatctctctccatgtgatagtttggagagtttatttttagttttttttatgtaatttaagaggttgatttgattgaattttgtgcggcgttgcaacagatgtcagtattttgtttacaatcagttgaatggaatccaattctacttcaaaactgcaaaagatcaatagaccccctcgtagaaagctgcattagacaacaatgtgaaaaacaagagttttcagaaatgttagatctacctaacgatcgtggtttatttcattttgatatgtatgtgtttagttttgactttcattgtaagtgtcgtataactttgaatcaatgaattaattctaatttttaaaaaatttgctcaatgatcacattaagtacctatttataattatgatgaaaagtcttaggtagaaagttaaaaaacttaaagcatatgtttttttttcaccatatacctgtaacaaatattttttacactatatattctttcgacttttgaaattcaccatatactcccccacttttcaaaaaatacattcacttatcttcaatgactaacggcgttaaactcagttagtcattaactcctaaacctacctttaatcctaattaactaacctaatcctaatcctaactctaacactaaccctaaccataacccctaatttaataccctaaccacccttcccggcccccaccctaactctaagtaaaccctaactctctatctccctaacccactcctagcccaccaacccccaaccccaaccttaaccccaccagctccccaaccaccgcgtccccaccctccctcccccacctccacaacctcgccatccccatccctcccccacccccgcgcctccacccctttgattttcgcaactctcacccccaccccactgattttcacacccacaacccgccctcgtcgattttcgtgcccctcccctagccccgtcaattgaacccgcgaccgccaaatttaccagattcataaaacactcagatgccgttcgttttggactgtaatccattgtcatcatcaacactgttgatttcatcggattcccagtcctgggaaaccgaaacgttcatgaaattcctgccgttgggtacgaacatcgacgaggttggggtgtgagttgcgaaaatcgaaagggtgaggggacgagggtgggagaggggtgggggtgttgggatgcaggggtgggggctggcgaggctgggggtgggggctcggtggttgaggttggggggctggtggcctgggggtaggttagggggagagagagagttaggatttacttagggttagggttagggagggggatgtttagagttagggtattagattaggggttaggattagatttaggttagttatttagggttaggagaaaatttatgggttaattactaacagagcttaacgtcgttagtaattaagggtaagtgaacatattttttgaaaagtggagattatatggtgaatttgaaaagtcgaaaggatatgtagtgcaaaaaaaaaattgtcaaaggtatatactttctccgtttagaaatcgttgcaccatttgcatagtgtttcctattcacatcttatccttcgattatctttggtgacttatattttatggaaaacatagttatatgaaatcttgttagattcgttgcaatgtatattttttaaatatttttactcattaataattaaagatattaacgtttgaaatcatgtatcgacaatcgtgaaaacataaaacggtgcaattatttttaaacagagaaagtatatggtaaaagaattgacattttaccaattcaaattagctagtggagtaaatgttaatgtagtgagtctaaattgacaaacactctcaacaaatatcttccatctactcattcattgcctagtaagaccatactcagaatcttgccaatatttataatatattaaaatcaatacacttttgcatctcattcctttcggctttcatccgttgcttatataagttcatagcctcaaagtcatcacacccaaaaacaaaaaagtgccaataaaaaatctcaccacctcacatatatatatttaatacacaccaaaaccaaaaccaaaaccaaaagtattctttatgtaagagagagaaaaagaaaagaaacaaatatcttctaagatcaataccaatcttcttcttcatcactcatcggccggaatttaaattttccggcgacccagataattttccggcgagatggacccacagctaatttctattagtggtagcaacaacaacaacaataataatactagtactagtactagtgataataacaattatgagaataattgtgttgaagaaaataatgggttacaatggaccaacgaaaaacattcaaatttcttgagattaatggaagcatcttttgtacggaattttttggagagaagcagcaacaatattaccaaagttactcatcatgtaacttccagacttgaccgttttgtccctgatatttccgagtccacccttgatttacataaatcaggtaatttttcatattttatgaagtattatttaattttcatctttatgattttgatcatcatatttttatgtttatactcactccgtctcaaaatatagtttccatttcattttgcacggtctctaagatgtaactttgacctacgatatcttctatttattattagtaaaaaatataaaaagttgatattaggaatttatagacgaatctaacaagaccccttataaatatattttgtttttatacatttagatcttgtcttgatttgttgatttaattctttgtgggtatttggtgaaatgtataataagactttagacttgcatgtaatttagatttatcgttggattaatcaaattctgttactattgagtttgatttaattaaagtaatgcattttgtattatattcttacatgcatcttcatcttgtttatggtaggactgaaattttagtgtttgtttggtttgaatgattttggtttaataaaagttgcacttttttagaaattgctattactagtatttgataaagttatatgtcttatacagtggcggatccaggaattttctaatggtggttcaccatcaattaccgttcactaaatcaaaataatttttttaaaaaaaatactccaaactaaatttcaatcaaaaagaaaataaatatatatccaataattatacaaaatacaaccaaatagtactagaaaaaccaaatatccaaattatattacaaaatacaaccaaatactagtaaaatcaagtaacagttgaactaaatttgatgtatctcaccaatgagacatatgccaatttgtgatagactcatagaccatcaattatcatcaacaaaatcagcaagaaagtgataacacccaattcaaacataatgtagtttcaattatcaaacaccaacaaggcaaatgcaataacacacaaatcaaaatacaacaacaaaatcaacatttataacaattctaaattacataatctgatatataaacacccataacaactaaaattgcaatttatttttcaattctcatgaaattgataaaccctaatttataaagtaaaacaagaaatcaagcaaattgagtagattaagatgtacctagagtagattccgtccaccgtagtccaccgtcgtccaccaaggaaggaattccgaccagtttcgtggctgcacgtcggcgaatcgtcaaggacgatggcgatacgaagcgtcgaaacttaaccacgaatcgcccacgaaggacgaagccaccaacagtcaatgaaagcgctgccggtgaggccgccggacgaagccagtcaagccaccagggaggcagcgagaaggcttgaggagttgaggtctacgtgagactgtgagagagaaaggtaggtctgcgtgactcgtgagagaaaagagcgttttttttttttgcgtgattttttgattttttgattttttttttttttttttttttttgctggtgcacgtgcaccagcgtgttattacctacatccgccactggtcttatagtgttaaataatactattcctcaaccgaaattttttacctatagtaacctagtaatcaacttcctcctattaatgggatttataagtgtaatccttgatcaaaaatatccccaacaagagtgtaacaactaattaacaataatgtaaaaaactttgtgtacactgtgtctaattgtattcttctattactgtttaccatatatagttcataatataccgttcataagatgttgagtttgtcgggtaagaaatcgcctacttataaattaaaattaggcaatggtaagtctaattttagaaagagaatttgcccaataataactaagttaattttttcgatgattaatttaatccatttagtgattaggtctacttttatattaaaattagattcttttttaataattttgtaagatacgacttaaactatagtgatttaaagttttttttaaaaaaaaatcttttaccataatgagtaaatctagatatttttgctatttgttatgtttcgtatgtctttatcaacttgtttaattggatctttggtatttttttttttttttttttgaggggaattggatctttggtatttcgacaacttctatatgtaactatcgaccataaaaaaaaaacttattttataaattttaaaatcgtagattaagtgaaatcatttttatataaataattattttttaatttttaaatcgttagaatgagtgaaccaaacaaccaccaaaaattatttaaagagacgtttaattttaatataaaaatagacctagtcactaaataaatcaaactaatcactgaaagaacttaagtcaatcactattgggttaattttattttaaattttggacttacccttgtctaattttaatttaaaaataatcaatcttttataaaaccaactaagttgtattcatttttacttcttttaatgaaaagatcataacttttagttgatcttttaatatatgatgcgatatttctttcaattcataaaagggtatgacaaaagatgtatgtttacaacgttcctttacaatgctaaatatagaatattagttgattattcacatatatttattttttaataagatgaaaaagaaagggtccaaaaagatagaacttagatgtcttcttcttttccttttttttttcttttgagggttgttgctgaatattgattgcttcagaaacaaaagtaacgtagaatatgcctgttgagatatttttagcgtgataaccttgacctttatgtatataattgcgatatttataagatattttcatgtctttcaatgtgcttttgcttttttatattattactagtcatatatgcacgcaatgcgtgcgatagcatgtgaagtagaaaataaaattaattgggtagaaaaccgtcttttttttttcttttgacggggtagaaaaactgtctttacattttgttttttcaaaatattgatgtttactttaaatgtcctactttcccccctttttttcattcaaatgagagagttagttatgtctctattttttttttcttttttttctttttctattttttggtatcccccatgtgttgccttatataatagagatcattgtatattttttttttcctttgagatgattttcattgtacatcaatatatttaaattagtgcatggtattatattaatctacagtacattcagatcgagtgagcagaacttgtaacaggcaaaagggaagaggcattattcgtccttacaaaatgtcacatgatcaggtttgtacaattttagcattcctttaatattttaaccagtaagcgttctagtgatgtcgagagttgttacttttcgtattttttgtctagtaagaaaaagttgacattataacattttaagtaattgtatgatattttaaaagataaatccttaaaagtttggggaagaaagcaataatttaactttttacatggaatgagagtaagagtttgtctataatagtcttttgtcatatgttatcataaaaaggttaagtatctaactgcttgcgtacatcttttacaactaatgagatataattataaaaccttaggatgatattttattaaaatgctaactaatggtgttatgttggattcatggttatgctttcattttttatttcaaagatcacatatttgataccttgtaactacatgacattacatttataattaagagtttgacttgaaaataaaataattgtattagagatttagaagagagtgtcacagactcgcatgacacatactttttaataacaccttttgatatattagtatagatattttattggatgagagagagtaaagggggagacacaccatggtagcaacaaaggttacgtaaccgtgtttcaaatcatcaaatttttgtttttgcgtgaattgttttccaaatacgtaatcataatttaagttggttgcataatcataatctcgaatgaaattagtaaaatcttgttgatacgttggaggtttagtgttgacatgactgtataatttgtttttttacctataggtgaatatgttatgacatcctttttaattattatcacaattttcattatattagtgattgtattgcattatcaagaatcaaaattatttatctatttttttgcacatttgattatctgagaattgagacggttccaaataagcaaataatatgtcatacatgcatgagtgtatccgtagtatatcatgcatggacaagttaagaatgatacaagtgagctcatataaaaaattataagcaaaatatgaggataatgtatagaatgatgacttcatagaaatcaaatagtccacgttgagttatgcctttagtacttgtttacgttctggaccaaactcgaaataaaggatacgcattgagaaaagaataagaaaataaaaataataggacgtggcaagatattttggagttgggcttttcacaaacatgatctttttcgaaagtggggccgtttttgtctccacagcatgatctttatacatgaacataaaatatccaatcctcgaatagtactagtatgcagatatttcaatgacgactttttatctggttttatttattttttttccctttgacccgaatttattgtatatttcctcatggtattaaggcatgttttcttcggcataaaatagctgaactgaattgaactaaattgaactgaactgaattgaatggtgatatgtgagagtaaaagtattgtcaagaactgaactgaactgaattgaactaaactgaactgaaaataagatggggagaacaggtcctaaattaagtaaaatgtgtttgatactttttacagctttaattcagattttgactgtttactctagtggaaaaacttatgtccaactgtatcactgtttggtatcgtaggtgtagcattttttgattttacaatcgaatataaattttaatttgatactataaacaagtgttgcacctagttgaatagttgatgactatattatactctatctctttgtatatcacaaatgtttgtctcgtatacacattttaaaagaaaaattcatatgaaggggataattattacacattttaatttgtaagttccaattatgaattattttctacagatcctaagtttattatcgtgtgatttttataggttccgacttacttgtaatcggtttagaagataagattatttaaacgtaatctaaacctgttataagtaactaagacctatgaaaatcacaagatagtaaacttaagatctacatgaaataattcatagttaggctttataaaagaaaatggaggaaaatttcttatcactttcctttacgcgtagtaattatatatatcttatatataaataatcaaaatatttattcatggattttaagctaatgtattgaatattgatattacagctaagctaatgacttgtatggcatgatttcacaggttgtcccacatctaaaggataaagtaggcgacaagggtcagtaagaccatagcaagtgatgtgaagtgcagcctaccggcgtattgctgcttctataaaccaaccccgtatatctggcgatggctgaaatatgttttggtagtagtagtagcatcgtcgtacaccactaatacttagagcattctgttgatctttcattaactcacttccttggtagtataagtatttcagttgaccactgctttgtcaagcttcacttccatttttaaaggaaaaggaatataagtaacagttgatgaatccatcaacacataacttctcttaagtgaaccggggtttcaaaatcttcaagacggtcctgatttatgtcaagtgttttagccattaaccaataattgattcgtgaattattattgattgtctttaatttacaacaaaccttcatagttatttgaattttgacccatgtattcccttacatagcaattctatataaatgtcaatagtagatttctggtgacatttataaatttatgcattatacaggctaaaactagttaaaatgaagataagagatcattaaaatgatactaatgtgagaacaaaatgagagagtgagagaagatggaggctttagtcctttatgagtgagctaataaggtattttttaggagaaataaagtgtcttacataaggtaatttatctcattagatatttataaatatatagcggaattattctactttattttagttttgtaaatacgaaaactaacaattggataactaaaccttttttaaaaaagttttgagctatgaggttgggtttggtttcaataaatagtatgttcttgcttgtagaacaaacaaaaaccaaacagtttgttggtgtgagatttttttcagtcttttctctctcctttcaataattgcatgtctttgtaagtttgaattattactcgaatacgacacgtcaacaactttggagtctatgaaaggattttagttagggttggtaggggccttactctcgacaattatttttggcatacttcctcctatctgaaatgaatgaaacgtttccctcaataacttgaaacgtttccctcaataactctcacataaaagagagaagtgtttcatttacttcaaaccgagaaagtaataaatatcatagatattttatatcaaatatacaatcgtgtagcatattagtaaaagatttaaactttaatataaaggtcgaaattcaaaacttaatccctatcttcgcccaatacctgccattttgcatgatatccaacatcaacagtcaagctcaataacatcaatggtgaagaatgcattgtcacgtcgatttaacactataagatagatacaaatatatagtgaaatctaactcatcaatatacattaattgacttattttttatctttaatggccgactaggtaaatattatattattatctacgaaaaataaagatcaattattccaaatacaaactatttatacatacatagtaaaattctaatataaaacaactttgcaaaaaaacaacaaataatacagtaaaactaaacaaaaataggaaatagaaaatttattctaaattggtatgcctagctctaacagcctcaggagtctggcccaaaatatcagcaagcttaaacacaaccatttcaaacaacacaaacaaaactccctcataaagacttcccattggaagcaacggcctagattcatccacgtgtcctacttgatgatcatcagccattgtctgagcaggtacatgagctacaacagttgcatactccacagaggatccactctcaggttgagcagtaagaagcaacacacgagcaccgttagatttggcaaccttgcaaatggcatcaacggtggagaatcctccgggcccagcagaagctatgagaagatcagtgggcccaatagggggagtagtcatgtcaaatacacagtaaacagagaggcccaaatgggctaagcgcatacacaaggcctttagcattaggccttcacggcccactccatagacaaagatgcggcctttttgggctgaggtggtgcttatttgatctactaagaggtttaaaggtggtggtgtggtggtgggcttggtgaatatggtggctatttggttgcatatttgggtggccattgagtggcttgtttcagccatttcaatttcattcacaaactctctctcttcttgggatggggagttctattttagtaaaaaactttgcccgggatggtttggctcttattcgtgaaaggcttgatagggccctcattaatcctacatggttggatgcttttccttcaactaaggtaattcatcttcctcgtactcactctgatcattgtcccatcctcgtttctacggatgatatcatgcatgcaaatatttcttcttttcctttccgttgtaaagaagcatggctttaccatccggattttaaagattttttcacaaaaaattggaattctccactggttgactttcttcaggggagtcgtaattttcataactctatttctcattggaatcataatatttttggtaatattttacgaaaaaagaaaattatcttagctcgcctggacggaattcagaatgctcttgcttttcgtcattctgattttctttcaaatcttgagcaacaattactttcggacctagattatttccatcatgttgagaaagtaatctgggctcagaaagctggttttgattggcggagaaatatggattataataccaaatatttccatattattgctaagatcaaaaaaaccaaaaacaaaattgtgagccttcaagataccaatggcaatcttatccatgatgaagctgctcttaaagtgatggttacgacctatttcagagatatcttctcttcctctcactcctctcaccccctttcctcttccttcacttcctcaatccttcttccttcccattctctcccttttctcattcagcccccttcttcagacgaaatttttcaatgtctggcccaaatgggccccactaaatgtcctggccctgatggtattcagcctattttttataagcacttctgggaggacatcgggcctcagattacagcctttattaatcactgtttccagactggtagcatcccctctgaaatcaaccacacttatctctccttaattcctaaaattccccaccctactaacgtcaaagatttccgccccatcggtctttgcaataccatctataagctcataacgaaaatcattgcttctcgtttgaaaacttatcttcccttgcttattgatcctgtccaaacaagttttgttccggggagaacaatcgacgaaaatatcatcattgccaaagagctcgcccatattttcaacaaagctaagagaggcaaaaatatcatggctctcaaaattgatcttactaaagcttttgacagccttgaatggggttttattagggataccttacttggttttggttttcctcaactacttgtcaaactcatcatgtcatgtattactacctcttccatttcttgtctttggaatggtactgttactcattcttttctgccctctcgtggcattcgtcaaggggaccccctttccccctacttattcgttctttgtctggaacgtttatctcgcatgattaataatgcggttgttgagaaaaaattgatcccccttcgtatatcgagagatttagccttgtcacatttattctatgcggatgatgtttttatctttgggagggcctccaattccaatctccattccatcctttctattctgaactcgtttggggatgtctcaggtctgcggctcaatgcttctaaatccatcgttatttttccaaggaagatgtcttatccagtccgtatgggtgttgttcgcaataccaccttcagattctcttcttcctttgggaagtacttaggtgtcattatcagtcccctaaagcttaaaaaagttgatttctcggtcattttggataagactaaggatcggattaaagcttggcaagctaagctccttaatatggctggtcgcactactctgattaaatctgttcttaatacgtaccccctctactccatgcaaacttccttgcttcctatttctgtcttatcagcccttgatcagcactgtaaaaggttcctctggaataaaatggatcaatctagatacctttctcgcacttcttgggacattgttaccaatcctataatggttgggggccttggtattcgaaagttgagaatttggaacctttgtttcatggctaaactagcctggaaaatgttgtctaatccttctaaactttgggttcatctcctctctgctcgttatctcagaaattcttcccttctttcttcttccccctctccttctgcttctcccctttggaaggatatctctaaaggtctccctattcttaaccatggtctcaggagaattattggtcagggtctagacactagtctctggtttgatttatgggttggtgactgtcctctctacctctatccagggatctccattcctacccccttcgaacactggagggttgcccacattatccacaacaattcttggaaccttaatctcatcactaccctcttccctaatcccattcaagctcttatacttgctactcctctctcttcctccccccctaccaatgacaccctttgctggaagttcactcagtcaggttgtttttccattaaaacagcctattttaattcccttcctcctcttcctgtcccctccttcccttggaaaaagctatggaaaattcattcccctcttaaatataaaatgcttttttggaatcttgcccatgaaattcttccggttggatcagttcttcattccaaaataccctcctttaatgaatcttgtcatcgttgccttcataacaaagagacccatcttcatacctttcgagattgtcctaattcatctgtgctttggtctgaaattttctgttcaaatattatgccgcccaattttgattaccataagttccgaaacttgtcttggaatgagtggcttcttttccagttcaatttcaatgactcttggttaacaactttcataacttgcatttggcatttatggcgttcgcggaataaggctgtctttgaaggagccatgatgagaacaaatgctatgattaattgtttttggtatgatcttcgtagcactaatcttgtttttcaggattctattgctactgcttctcctccagctctctctacctgggccccccctccatttgggtacttcaaacttaatatagatggagcttggaaagccattgatagtgctggtggtggaggggtttttcggaaaccagatagcacctggtatgttggattttctgcaaaatattttgcttcatctccacttgctgcagaacttatggctctgaaggagggtcttacgatggctcaagatttcaagatggattgtcttatcattgagactgatgctttggaaatgaaggctatgctcaccaatgtagaaaacttccagaatagtgcgcttgtcaatcttattcgggatatcagttctcttctcaattccaatgcttgttactctctcatgcatgccaaacgatctgcaaatggtctggctcatctgcttgctcaagaggggcaaaagttggcggtttcgaagactacttatttctcatgtccagatttcgctttgaacgcttacaatgaggacgttaatagaaatgccactacagcttctcagtcttagctgctttagtttgctcccgtattgtctaaaccatctgatgtattcgtctcagatttatgttttcttcctttttctttggttcaggtccttttatagtaaatggacttattttggcttgtatggtgatcatcttatcagatctcccatattttgtaataggcctataatcagttggccatgtcttgtttaatataaatatgctacctttcagttaaaaaaaaaaaagtaaaaaacttttatggaatattttatattgttacaagatagtaccaattgtggaccaattatattattgggctttacttgtccttggactatccaaacactcagttgcttcgtcagtttagattttacaccattaagcatatttttcgcgaagctaatcgggtaacaaatctaccatcaaaaaaaggtcacaatatttttactacctcgattgacgtggatgtttcagaaaaatttttgttaaataaaattgttcttctaaattcgttaggagtctcccttgagagaagaatgtcctaactttctttatgtatcaaaaaaaaaatattatttgactttagccttggagcataaccgatggttgaactcttttaaaacttcatcaagtattttattattttctatatcattcatatcacttatgcctaacttactcaagaacctccattttgttactctcaatgattatacaattttttgagctcatgaattctctttcctactatttaccataccccattatattttctctctccttttattccatccaatactcaccattcttatcattttcaattgattagatatatacataatgatcaatagttgtaattaaattatttttgtaatttgtattataactaattattaacattaattgaatttttaagccaattgtttcctacaatatccaatttgggaaatttttatgaggctaaataagttttagcaaaaaaagtgtggaagtactttaatattaggttctatttatagaggaagaagaaatagaatggttgtaatttttttttaaaaaaaattcatattcagtttcattaacttataattcgtatcatattcatttttgcattttattattatttaaaatttgtatacgtttattgtttgttggttatcaatgtgttagagttcactttctcataacaacataataaacttaggtcccacaaatattaaggttagcttttccaaacaaagaatacttattaaccatgaattcataataataggtcatgcctctgcagggtattatcattaattttgggagataaggtaaattgcgaattttactacttagtttggttatccttaacaaaatcatcaaaagcgttttgggattgaagcaagagatagttaagtatgcgatgtttgccaatctaaacaagaatcataaagtgttagaattagttacgtaaaagagtttacttaccttgagaatgtaaccttaagataagtcctcagtctgcttagtgttgtatgttgataggatcttgtattcacttatccaaatgggacattaaaattgaataggtgatcaacctagaaacctttgcatgttttaggttgttttataagcataaaattgaactttgcttttgttttttctgtctgtagatattatgtctaacaacaacaacaacaacaactatgttttcaacattcattcgatcctttccttgaaaaggacaggctgaatggtgaaaacttcattaattgggaaagaaccataagactcgtactgaggtatgagggtcgagagtatgtcttagaaatcccactgcatgtgattactgatgaatcaactaaagcagacaaacgtcgtgttaagcaggccaatgataagtgtgtatcgattacttgcctcatcatagcagccatggagccggacctccaaaagaggttcggatccaaggatgcttatatcatcatgcaggagctgcaggccatgttccaaacataggcccgagttgagtggtatgggaccaatacggagatactagaatgttacatgaagccaggtcaagctattggcccccacgttttcgctatgatgggtcttttcgaaaacatggaacgacttggattcccttacagggtagagttagctactgacattattctccattcattgcttgacaacttcaattaattcaagatgaccttcaacatgaatgagtctaaaaagactttgcaagagttgcacgggttgttggtcaatgctgagaggaatatcccaaagaaccaaagaaagagggtttgatggttcagaagggtaagggttttaagaaaaaatgggcaataaataaggacaaaggcaagcaagttgccaatgttgctaaaaacctaagccaaccgccaagccaaaggtggtcgcggaaagcaagtgcttttattgtcacaagataggacactggtagaggaactgccctctatagttggaggaaaagaagtttggtgcttccacttcaagtatatttattatagaaatcaatttgacttctatttctttatgggtattcgataccaattgtggttctcacatagttaatgatgtgtagggactaagaagaagtaggaggctggcaaagggcgaggtagagctgcgcgttggaaatggagcacgagttgctgcacttgtcataggaagctatagtctgcattttccttttagctttgttttagaactcaataattgttattttgttccttcgataactaataagaacataatttatggttttattttggattccaaagggttttgttttgaaattaagagcaagtgttgttccatttcctacaataatatgttctatgctagtgctaaattgataaatggcttatatatgcttgataggtcagtagaagtctataacataaatagcaagaaacaaatttcaaatgaatcaaacctaacctacatttgaaattgtcgaatgggtcatataaaccaaaagcacatctaaaagttacaacaggatgacattcttccattatttgatttcgaattatttgatgtatgtgaatcatgcttgatggggaaaatgataaagtcaccatttactggaaaaggcgaaaaggccagcgatctcttgggccttatacatacagatgtttgtggtcctatgagcacaaaggcaagggaagggtttaactacttcattaccttcattgacgatttgagtagatatggatatctctacttaatgaaacataagtcaaaatattttgacaaattcaaagagttccaaaatgaagtacaaaattaacttggtaagacaatcaaagccctgcgatccgatcgtggtggcgagtatttgagccaagaaattgataatcatttgaaggattgtggaattctttcacaattgactccaccaggaacacgacaattaaatggtgtatctgaaaggaggaatcagacattattggatatggttcgatcaatgatgagtcttgctgatctttcgatttctttttgggggtacactctcgaaacagttacatacacacactaaataggagtccgtcaaaggttgtagaaaagactccgtatgagttatgaaatggaaaaactccaaacttgtcttttcttaagatctggggatgtgaggtttatctaaaacgtttactatcagacaaacttgcacccaaatcagataaatgtctctttgtgggatacccaaaaaagacaaagggtcattacttctataaccgtcaagagaacaaagtgtttgttgttcgtaatggtgtctttcttgaaaaggaatttgtttctagaaagacaagtgtgagtaaaataattctagaagaaattcgaaatgagcaacaactagacgtggttcacaccatgccagagacgacccgacaagacgaaagtcaagttcaggagatgacgtattcaagcgcgtgaacctcctaccatcccacttgaatctaattcaagtgaagatctttaagaagttgaagaaaatatttctcttgatgcttagtcctctcgtaggtcaagtagaccaaggattccaaacaagaggttggttgatttcctgctaactgaaaactctgaaattatgattttggagaattcaaaacctattacctacaaacaagctttgacgagcctagactttgagaaatggcttgcgcccatgaaatccgagttagactccatgtttgagaataaagtttggaccctaaccaacttgcctggtggggttaaccctattggatgcaagagggtgttgaaattgaaaacagacaaagatggaaatgtctacgtctataaagcaagactagtcgcaaaaggattcatgcaaattcatggtatagattatgatgataccttttcgccagtaggaatgcttaagtcgattcggatacttttagcgattgctgcattttacggttacgaaatttggcagatggatatcaaaaccgcattcttgaatgaggatgtgcatatgacacaacctgagggttttaaggatctagaaaatcctaaaagggtttgcaagcttaaaagatctatttatggattgaagcaggcatctcaaagttgaaatctttgatttgatgaggcaatcaagaaatttggcttcctcaaaagcgaagaaaaatcttgtgtttacaaaaagtttagtgggagcatcttagtcttcttgattttgtatgtagacgacatactactcatgggaaatgacataccaatgatcgagttagtcaaggaatggttgaaaagttatgtcatgaaggatcttggagaagctgagcacatactgggaattaaaatccatagagataggtctcgaaggatgattggactgagtcaagaaacttatattgataaatttcttgcaatttcaacatggaaaactcgaagagaagattcattttccatgtcacatgtcatatcacatagcacgagtcagttccggactgagcctgatgagttaaagcgaatgactagcatatcttatgctttagctataggatctatcatgtatgtcatgataagtactcgaccaaatgttgcatatgccttgagcatgtgtagcaggttccaagcaatccaagagaagcacactggattgcagctaagagcattcttaagtacttgataagaaaaggcatattcttagtctatgaggtgaaagtgagttggttgttaaaggttatactgatgcgagttcccaaaccgacaaagatgattaccgctctcaatcagggtacgtgtttttgtctaaatgaaggagcattgagctggagagctcaaagcaaagcattgtagaactactttagcgcatggccttctcaaattcttactttttgactttttgccatatttaacaagtctctctttgccccctctcccacctttctcaattccttttttgtgggttcatctgatatggttggtgaaactctagttagtgttttttaaattgacaatctagttcttgttaatttctaatattaagtagtagtatataataacataacctataagtactttatgaacaaatcttgttgcctaacaataaagtacataacatagccggaaaagacatatgtcttctatgaataagccatagtgtttcaactcacataaggacatattgacaagtcctgtttgttatgaacaagtcttcttatacagcaactttttgcaaccatatttacaagtcttttacagtatcgtgcaccatattttctctcttggtggcgtagtgtaccctccgaaaacctcatttggctggacgcggcaaaagaatgattacatacaataggtggaagttagaactgttcagatcaccatccagcagccaactatatagtctggcacgtgacaaacgtcaccatccgacagcaatttactagaactgactgcggagtctggcatgtgaacaatcggacagcaacatgcttgaactgattatagagtttggcacgcgagcgaatctgattgtaacctgcttgaagtgcaatagagtccgtcgtggagagaatccgacagccatccgttgtactgactatagagtctggtgtgtgagccaagttgttttaaccattcaaaagccagctcgtcctgtggagtctaccgtgtcagccaaggcagcattccgcagccaactattgaactaagcccggtgtgttagtgaagaactatattaggttggtcttcaattagatccagtaagattgcatttctgaaattgcatgacttgtcctcttaagctgcactcctctacctgaaagtcaatagaacaggtttcaagttgtcagttttgaacttccgtgaagtgtaagagttgttggaaaaaggttctccaccgaatatgtgagggggcattccaatagatccacttagtgtgggcctgttggcccctcaccactaatatctcttcttcgttcaatggagaacaagttttccatctagccttattttctattttcaaggttgtaagtcttagttaaaggcaggaattcttgaactgactccacaattcagtaaatccaattagtgtggggcgtgaaataacctgcgatagatgtgttctcaacaatagatctccgcactcttgaacaaccgtaacttctccactgtgtactctcgccaagtcagaaattagaacatccacttgctctgcctgcatacataacaaaatctcaggcaagtattaagattaatcacttgatctaatatgccattcatgtattgactatatctctgtgaagtacaatacaagatgaattatttaaatatcggtgattaacatttgattacatcatgtcacaagatatattattatttctgcaaacagaacttcaccttgggcacaaagccttgcacttgcgaacagatgctttctgccacctttaaggctgaattcatcgcttcgtttatctcttttatatcaatctacaaaacacccacatacgttttgtaaaaaggaaacatagagagttcaagatagagtagagcaaagaagtagccaaatatcttacctttacattaccattgagtggaagacgggatgatataatctgcaaaccttgcgttaactccaacaatgaagtcgtataatcttcttctaaagcagaccattcatccaaagaaggcatctgaagatgcattaaatactaattaataattttacaaaactaggaatactcgcaacatatgagtgcgtatcacggacataatatgacataacatcaatatagacggatattatagctcctcataggtcagctcttcgtcaatctagtacattcagggtgtgtttggttcaattactggaaatgtaatggtataaaatcagataagagggtggaaattaaaggtaactgtgcgcattatttcagaagttatctggtttaaccatggaatggaatcaattgaatcttagtttcatgaattcacaaagacacaaagaactaaatttggtcttggatgacgaaataatttctgaaagtgctgcatccaagcactcccaagattcacaagttctcgccttctcggtcttagtttatgagttggtgacgacatgtctcaaaatgtatagtagcctcacctgagcatcaagaactgcagatagagtttttgcttctttcaaaagtccaaaatcaacacgcttgcttttcacagaatcctgcagctccgatatctttactcccaatgaataaagcattctctgcaacacgtaaaaatgaaattacaacactaatcctaaacatagaatgtgtagaaaatgttacagaagcatttagctgacaacacatttcatctgaaaatatgatgacaaataattaacgtgtttttcctttaagatgagctatgactatgctggatcatttgtatatctaactaatttacatttgtgtttcccctaggaaagtgtttttcatcttatccgcccaaccaaacaaggctatatattttcaaagatgtgctcaaagagtgttaataaaagacataaaagatctaacgctccgaatttactgacaccaaatcattcagtttccagtatctagcagttggtgctttccttttcatgatgcctaattgagcaggataaatccttaaaccctcaaaaggtacactatatctcaactatatgttcataactcaaacaaggcttctctaattcaggtcaatcatagaatcgtagtaccttgtaaaaatttccgaaaatgccgtaaagaattaatcacgacatctttctttcataatgcttaaatgctttaactttccaaaatcaatagaacttatccatctagagaacaccaaatactaatacatttcaccaggaaaaagcacactctattatacactcgggtgtatgtataatataaccaaaggtatatttctactaatttgcagctttcgacaaatatagtttgttaaaatatcatgacacaactaaaaaccttaaacagcagtaaatgaaacaaaccaataatgctaaaccaatgatcaacaaaaaattcaacccaatgattgaacataataaatcagataacacatcacaatgaactaacctcactttgcttcttctgggaattgaagcatgtttgagccttagcattagcaaacctccattgaagataatgattatgaagcaacttaagccgatgtacatcatcttgatggtttgagccacccttcctcaccgccaccttcttcccctccatcgtatgaggcctcgaattcgctaatccaggaggaggcatcggcggaaggtgaagactacgcgccaccttgttcatactaccacccttaacagaatgcaatacactcatctgttgttgttcattattggaaaatgtaaactccattgacctagaacacggcgtcgaaactctaccaccacaattgttattatcaacaggctctgatttcactgactcaccatcaccatcatcatcatcatcatcatcattataattagcatcattagcatcattattcatcccattggcttgaagcaacttggaggcggccgtatcccaactccgttgtcggataagtctgggacccaccggagcaggcaccggagtgtcggttctagaaccttccttaaaaagcttaatagcagcccggggtttggaggaggttctcaccgggctaaaggagctccggttcaaggaatcgggccgattttcgtcagcgtaacgcgaatgtggagctcgaaaatcggtgttggatcgtcggagagactgatttttagggaggtgagattctgccggtgttgacggaatttgtttagggatcatcggagattttggcaccggcgacatgaatcttgagctcacttcacgaaccctaggtcgagatcgtcgaggatttaggggatttgtcggcattggagttgaaatttctgatgataattggggtttagggttttccgacgccattgttgggctcattttgaggagttttggggggaaattgggggaatcggttcaattggagaaagcctagaaatcgaaaaaaggaaaattgatctagtttgaaggtagaatgggggagagtgtgggaggcaggagagagattgttaagttgaaaggagaaagagatgaagtagaaaaaactagccgttagcaagaggttcaacggtctactgaaaactaggggggataaagggggtattagaattattattttgttttgttgggggaggattatactattattttagttgggggataaaggaaccaaatgaattatctaattttgagaacgtattgtgtcggactcgtccgaccataatctttggtcggacgacttttaggtaatttcaattttttttcagttagtcttaatttttttcagttaatcttaagtttttttcagttagtcttcattttttccagttagtctccattttttttcagttagtcttcatttttttcagttagtctaaatgaaagtaaattacctctaaatgaaagtaacttaggtctaactgaaagtaacttaggtctaaatgaaagtaagttaggtctaaatgaaagtaagttacctctaaatttttttcagttggtttcaatttttgttcagaagaccaaatgaaagaaaaacaacacaagctgaaagaatttacacaccaactgaaagaatacagaagaccaaatgaaagaaaaacaacacaagctgaaagaatttacacaccaactgaaagacacgaaagaccaaatgaaagaaaaacaacacaaactgaaagaatttatacaccaactgaaaacatcaaaaaataaacaaacctgtaaagctcctcaaagctaagaccactagcattatgattgtaaatctcatgaatgaatttcgtctcattgggctctatatccatgataagcattcgattgttctagcagaactaaacaagacaatcctttctctgctcttaaatactgcaaatccccttacatttaagaataagaagagtagttgtactcttagagccgactatgacttcttcgtcttctctttatcgagcaaaagccactcatcaattgcttgtgaaatgaggatgagcacaggtaggttatacactttaccgaagcggtaaattccagatgagattagcggaagattgatcctatagcccactatcaagcggttgaggatctaccactcaagagatgatatacttacccgtgaagacgaaagtttaccggccggtctcaaaacccaattctcgcagcccgtccgatggaaagtattgggtcagacggtctgacccaatactttcactattattttagtttgattattagtataagttagtgagatcattatttttttcattatcataattatggtgtttattattaaagcacctttcgttaaaaaaaaaaacgctgaagtactttaaatccatatacttataattcatcattttatattacgaaataaaatcttattttcatttgaggggaacatctttcatagtaaaaaatgaaataattaagtggctaaacaattacaacaatatgcaatatttaatatgcataatggttagtctcaaggtaaacatgagcgagtcaaacacaacaagattatccccatagagcgtgagtgtcttatacaagagtagcaatttgtcaatgaactttgaagcaaccattgacatattagtatagaatacatgtatacttgaacataacttaggtgtatacattaaaattcctgttttctatttatacaatttgtaggaagaagtttagctcgaggcatgaagtaactgggttaagttattaggtgttgtacaagaaaaatatatagctctttataaaatgtattgctctataaactccaataatttgttaatataaatcaatacaaatcccgacctatatttcacatatcttttggttctcatacataatgatgccttaacttcaattcaatcattttaataactacaagaaatgtgatttttaataggcacttgaaactaggagtgaaaaggctagacacaaacgaaattaccatcctcatacaacatcgctggcaaaattcgatcatttgacattaaaagttacacgttcaagttttctactagttagaactattttttcgagaagaaaaatgtaattagttagttgttaaacaagtcttagaaactagaaaatgattttttcacatctaacgaagctgaaaaacaaaacactccgatagacgtatgagacaaattttagctaactatttccagtacataaaaagaaaaataattcctattaactcgtgccctttgtcagtcgcacactgcaaacgttgatcatcttttcaacaattatactgtttctatagctctttggaatcttcatgaaactaaaacttgattaaattacaatcatgtccaaacctccattctaaatgttgtttaatcacttcaaaacagaaaaaaaaaatatcttgactaaaacttattattctaataacgcttcttttaataaatatagagttcttcataaagctaaccctacataaggaatggagtattcgtactaagtttgattcatgtcaaattgcaggttcttcgttttcctcatctacccatcactcttccacgctgcatcaagcttcaaccatctcggttgcttggatccctcaaccaccattctccttcaagctcaattttgatggctctgtctcattaaactctgctgcaaatagagtcattatttgtaataatcttggtcaacttattcatgcacatcctataatctaggcacatcgactgtatttgttgccaaagcaacgactttccacaaaaggcttattcttacctctagagaaatggaatacaatacatccacattgaaggtgacaatttgctcgtcatcaatgtggttaagaatctttggcatcctctgtggcaaatttaattcatcatagacgacattgaagctcttctccaattcttgtcttatcaaattcaacatatatatcgtaaagccaacaaaacagttgattaggtggcaaatgttgatcatttatttcattccgaattccatattgtacatgattctaattctgctctccatcccatccttgtaaatgatatttaggagttctcctcgcgaggaaggtcttctaagatctatttcttcttacctttacaaaataaaatgtatcttaccacatatattcaccaaaacattagaaaaaaaatataaccaagcaaaatttttattggaatcatcttattatgtatttccataagaaaacaattcataaaattttcaaaagtgaaattgaaaacaattgagtaaatatgtttattgaaaagcgtgaaaagctaaatttgtgtaaaacatatgtttaggaaagaaaaatctttgtatagttagtaatttaatcgacatataaaaccactagagtccaatttaccatagtttatgattatactagtaatttatgcacgcgatccatgccttattttttaaaacgtaattctagcttttttgggcataagcacggatacaattcgaacattagacatgtttttttggctagttaaatttcgttggttaagcctatattgcttaacatgttaactcgacttttattttaatttaatttatactttctttaaggtttctaaaattaaaactgatgagcgataaaagaatgttatgcagatgtatttcagatttcttatattcttgtcaacaaagtattttgtgttaattgaatcattcactttgttaattgattcttttttcctgtaattcttgattgggtattgattgatcaaatatttgattaatataatttacttttttatttttttcagcacgaacgatacaaaaaagagggggagattgcgatctttcttgtaaagggtgagaatcgaaccccctatcagaaaagtataaaaagtttcttaccatgactaggacaaccttgattctcatttccatagtataattacattgatcaattatcaatgtatagtggcttaaatatctaatcggtttacgatcgaggggccgaagaaaaaaacacacaataacttgaaaaaaaagaagctgtattatcttttcttttgatagaagaagctgttatctttactgtaaacgcagaagaagagaaattgaggagcataggaaaatcgaattggggaaattgagaagcagcaacattaacaaataacaatggcgttgaagtttttgaacaagaaaggatggcatacaggaagtcttcgaaacatagagaatgtttggaaggcagagcaaaaacacgaagctgaagagcgcaagttagacgagcttcgcaagcagattcatgaggagagagaacgcgatgaatttcgccttcttcaagagcaagctggactcacaccgtaataatttcctcttttattcgattattattgcaatttcacatttcttatgcttctattgctaaattagggttagggtttttatttgaattttgatttctgttgttgctgttgtaggaggcaggaaaggttggaatttctctatgattctggattggcagttggaaaaaccatttctgatggatttaaggcacttgaaccgcaccctagtgctgataattccgcatcggcttcggtatcggcctcggcctcggcctcagcctcagcaccctcctcgtcaaatgtgagctcttttttcatctgatggtgcttaatcagtttatatctggcgaagttggggtttttttaaaaaaaaaattaatccaatatgttgagattgatagttacttgatcatttgctgttctttacattgaaagtaatagctagatcatctgttgctgtatttctttgctatagacaaaatccatttaattagacatgtaatcagtccacaagttagattgttgagctgagaaacttcatggggtttagagattacccgttgctgaaatctagattgttttttctatgaagtctgacctgtttcctgagttaagatgaaatgagaaagataggaaagtctttatgaggaaatgagcaacataagtactaatttcttcagcttcttgctccaatgtcgagatcgtgtcatttatatgatggtaactcttgtggtttgatcgtgcaaccagttgagagaatttgaataacttgaagatataattcattctgctgagtgtagaagagtatctctgaacttgtgcattttttgaggagattgttatgttggacgagtttaagattacactagactggtagaggataagacaggcaagaaataattcacatatatatcactgaactcaagctgttgtatatcgtcataacatgtatacaattgtcgcacttttggtgatgttctgaagttggaggatattgggaagtttgtatctggtcggttgttgtgagggtaaagatcgaattgtaaactatagaaaatgatgaggactttagacttttgcttatgcacatgcccccatggtgatggttccacagaggtgtgtgctactaatgcttatgacagaatggaatgttaatccatttaattgatttactatgattgtggcttttgggcctgccatgatggtggtagatatccaaggaattggtgcgtgtgtgaaaggaagaaaataagaggtaattggattgtgtatccacgttatctatggactatcatgatttatgacgcaattattggagcgaagggacaatcagttgtgcaagcaaacatcttaaattgatacttttgtgctgaccatgtagcaactttctctcatatgatactgctcagggacccagacatagactacgtggaaccatttaaaatttgaaaatctgaagttttatgtgcaactttccttggattcatcatcctagggtctaggggagttgtgtctatgtgaaagtctacaagaggcaggatttttttccctattggtgctctgatggggtgcgcaagacaagcttgtagttaatttgctttttcctatggttccctttcttgaaatttcagtgtatcatatgctttcttggaattttggtgatgagactcttgcatttcatgttctgtcctccatctgtttggaagaacaaggaggttgtgcatgggatctcctagaatgccttagaaaaatttcaagtaattttatctcatgttggaagtgttctttgtcctcctttccctaccaaatggatctcatatcttatctcttcttgtgtatttgctgttgtgtcctctaatcatattttgtggtgcatcatgcatgttgttctgaaacttgaaagtctgatttagttattgctgcataatgctttttaaatattcgatttcttaccatgattgcttcaactgtgtaatggatactatttctgttatcaatgcattgctgctgtgttgaggatagcttgctccttttctaactccctccccctttgtgcttctggtgagatttgctgttgtttctgattaaagctcacacattggacccttaatattgcagcaatcagctgttcctggagctctatttgaagataaaccgcagtctgccaatgatgcttggagaaaactccattcagacccactgctgatgattcggcaaagggagcaagaagctctggctcgaataaagaataatccagtaaagatggctatgattcgtaaatcagtaagctcttccacgttatattgtcatgcttgtttttactatatgtcttacagtcatatactcgtatggaaggtttgagtctgtgtgattgctggtctgctagcctgtagcacatctagattaagtttcttgtactgaagctgtgtaattattacagcaatagtagaatcaggattttatcattctcctcagctttgtgaaagttggtatatgcaatatatacagccagggatggggttgcattgggtgttattgttttgacttgatgagtagtaaaactatttcttgcttagatgctagtaaatttttcctgtgtattaaactctgaattacttcttcttttgcaagtataatagaacgcttatcacttgtcagtgaggttcagctagcaagtagcaataatcgatgatcagtcacatgtcctctttcacagttctaatgattggtttgttggattatgttactgcacatgattgatgtcaagacttgatttgtttttctaattttgttacccatgatgcagcaaacgcatctttttgttcctttttttctcttttttttttgttttagggttggaggtgtttgtggggggagggttgctgtgtgggacattactttgctgtttcacaattgcaagggcttcaattacctagctatatgttcatcactctgaaaggaagtagtttctgtgcaaatatatgacattctaacatgaaatttcttgtttcaggttgaaacaaagaataaaaatgacgaatctcatgctggggagcgcaaaaaggtgaaatcaaaacatagaaagcacttgtccatacatcaatctgattccgaaactgatagtcatgaagagagagaaaggaaaaagaaggtgaagcgcaaaaagaaagagcgtggctctaacacggaaagtgatggtgatgaaaagggggaaaggaaaaggagggtgaagaacaaaaagaaagaggatgtagattctgaggaggactctagagacagaagtagacatcatagacatacccacagagataatgaaagtgagaagcagcaacacagtagtcctataaagcaaaaaccagacagaaataaagattatgaacgaacccagagaggatttgagaaatcaaagcatgaggagtatcgctcagaccgtcatattgacagatctcctcacaaagataatgaaagtgagaagcagcaacgcggtagtcctataaagcaaaaaccagacagaaataaagattatgaacgagcccagagaggatatgagaaatcaaagcatgaggagtaccgctcagaccgtcatattgacagatctcctcacaaagataatgggatgtcaaatcaaggtagtgattctaagcatactgctctgccacctaggccagattcatacagacgccgaggtagggctactcaactctctgaagaagagagggctgctaggttgagagagatgcaaatggatgctgagaaacatgaagagcaacggtggcaaagattgaagaaggctgatgcggatgatgcacgtgaagctagccaagcaggtaattctcggggaaggtcgttcctgcattctgttcagaagagtgtctatggtgctgagaaaggtgggagctcgacaatagaggaaagtgttcgccgtcgttcccattttcttcagggaaggacggctgatgagggtaatgctttccggagatgatgggttttgtactagtggttttctccacgaggggcctgcatctaaccacaaggatcaaaccatgtttcccacaaagaagcttaaaatgaaggctatatgaatttgtttggctgttgaatctaatgatcacaattcttctcgtacataagatagtactcttcaagtcaaatggatactttgttctttttcagttgtgttatatgttggcttttggtggtatctatatatatagtccactttgaccatcttgtatgatttatattttatacgcaaagaaaaacatagtcacttgagatcttcttgttaaattttgtaagaaacatcaacttttttttacttatccataattatatgtattgatacatgaaggaagagagtacaatagctgagagtacatgacagccgagacgataatgttgtatgataaaatatcgtattctcaaatttccaaaagattcaaaacttctggtactagtaacaatcattgatcctgtttaaaaaaacatttgatatggctagtccttgactcctttccctttcaacttttgatagatatccacaaaccacaatcatagggaggccatggcctactgtcgcaccccccttgactccaccattgattaaagaagttggagcctatttctgtctttcaccacaaagagatcatataacacttgattcatacttcctccgtttcgttttaaatgcaacaaatgagtattatttgtgagatataaaatattcatttattgcatgtaaaacgaaacagaggaagtatattatatatataagtccaaatgaggcaatgaatgaccaccaagtccaacactatcgcggaaaaggtagaattatggaagatcgccaacgtaacttgtcatgtttggagttcatatatttgcgtttcatcaaaacctgggtctaacatacatacctgttcgtttatgtatgtgaagaccatattagggctggtaaccttctctcatcatgtttttatttacgtaaaattaggtatatgctgacatttgagtcctctcatactcgtatgtaggatgagtctctatgtaaattttgtttaatgtgtaccgtggaatgaaccaaattgctaccttgaacatgtgtattataaataacatctcgaaatctagcacaaaaagatgatcccttaggacacatgaagttcacaattcattacatttttctgcaaagtacttctattttacaatgtgaaacgaatcttcagaaacaaaccacaatacattcatgtaaaccactattataagcatacaagaggtcgtttggttcaagatatggaatggaaatggaatggaaacaaataaaggagggagatggtaataaaaatggttacatttattgggtgtttggttcaagccatggaatggtaatcattaccaccagctaatggattttgttacttaagggggagaggaggtaacaaattgggggagtccattaccaccaagtaatggtaatggaatggcgaagggttggaccaaacatgaagaaagggaatcggtaattaatttcgttttttaatcctaaatatagtgaaccaaaggagctttaagtctataacattgcatttgatgcaaaagacccctattaagcaacttatgtgcctaaacaactaaactaaaccacataactgtgttgataaatatgttaacccttcttctgctgcttatgaacactctcggccttgtcttgaacagaatcttctgcccaactcacaattccgatcacatccaattatacattcgtcgatgattcggaactcctgctttgatctccatcagaatgtttaactttcttcaacgccaaaagtggcttcttcatggtgaccctattgtaaatgtatatgattcctgtaatagttaatactagtcttctatccacgcaatgcgtgcgtcgattgtttgggtctattcttaataaatttcattaaaatataattatagaagtgtgatttataattattgttatacaaactactataatctataaagtgtctagaaattgagataaacatttagatgtaaagttttgtagtcaaattaaatttgtaattttatttattgagtaactatttttctcattatgtcaagttactttgttatttatttagtttattattggaattttgactcatttttaaattaggaaaggatataattgtacaaaatctgaatatccaattaaatacttcctccatttagaaatagttgcaccatttctattttgtgcactactcacatcttacacttagattgtctttggaatttatattttaggacaaacatagtcatgtgggatcttgttagatttgtcttgatgtatattttattaaaataaactttttataatttgtacttattgataattaaagatattaatggttgaaattatacatcagcattcgtgaaagttagaaattgtgcaactatttctaaacagagaagtatatatttagctaaggacaaaaaaaacatttaattaagggacaccatagctccccattgacttatataatagagatgtagtcaataaatttttggacatcaacaaaaactagggtttttctacgttatacccttgtgtttcttcaatttctacgttttaccctaactttttaaaaattctacatggtaccctcaagctaacattttttaatgcacgatgcccaaactactgattatatgtcattaatttcatttatttttttaaatttattggaactaatttaacttatacatagtttaacctttagaaggttattcactaattagattcgttctaccagaatataaaaaatagacgaaattaatgatgtataatcaatggtaggggcattgttcgttgaaaaaggtaagtttaagggtactgtgtggaattttgaaaaacttgaggtacaacgtagaaattgaaaaaatacaagggtaaaacgtagaaaaaccaaaaaaactatcaactggaaattcataccacatccatataaaaacaggcatcacttttgaccattatcccaatatcccgaagctagttgtacttgaataaggtttcctaaggaactaatacacattacatactccatattactattcctaaatcctatttctactcgatataggaatcctaaatctacttttactcggttcctaagtaacatgacacaaactcatctgctaatgctataaataatacactcatgtttcataactcatagattcatgttatatcacattatggcagacgacatgagtgatattattccttgcgaaattgcaagaaaaattgcagttgaacatcttgataatctagacgacgtagaaagtttgtcacttgtttgttcttcttggagatctgaaactagcgatattaattataccaacttcttctcctccaaaaacacccaacttccatggttaatgctggctgattcaccctctagtttattccgacgattttacaacctctctaaacgcatgtttcttaagattgatataccaccattcgagcacgacgaccacgaccaccgcaggtttttctcttcaaaaggatggattattactgtcaccaggaaacaagctcttattggcttttttgatcctttcactactactctcatcaaaccacctagtatcccaatactttgctttcaacgcggtcaatcgtggaataaccgttcttatttacatagtttttccaaattcatattctcagataatgcaagatcatcttcttcctcctcatcctctgatttccaggttgctgtgatttacgatatatataaacatatcgctttttggagatcaggtcaacaacaatggatgaaacctacttttgaagttaataatattgaggatgtctgtttttttaagggagagttttactccattgattatcgttcagaagttatagcctatggaagtgagttaccaacgagtctaccacgaactattgcatatttagactcagtagatattgaaagttgctcttgcgttatcctcaaaacatggttttacatagtacctttcaaccaaaaatgaaagcacattgttgatagtacaaaggaagatgtgtaataagcccgacaaagacgacatgtctaatattaataccaataataataatcccaaacgatggtgggtggaatccgtcagcttaattgagctcaatgttgacaatggcgaaaccaaacttatcgacaatataggaaatcgggcattatttgttggtttaaactcaactttctttgtagaggttgaagatgaggcattctcaggaaaggataaacgttgttgtagagctaattcaatttattttactgatggaaaatttggggggaatcacaggcgtgctggggaaacagatttgcgtatattttgcttgaaagaaggtaaaatggttgaaccatattatgaaggtccttctcgatacaactgtgtcaatccacctgtatgggtggagctccctcatcagtaaattcttttttttaactgttggatgatagtagaattactgaactactactagaacaattaactatactgtattttctttattttattttatggaatggattattattattattattgttcttgttgttgttgcaccaatttacctagtgactcttaattatatagtaaaaacatagataaacgtattctaggaattggagttttatggtgttctttgatcgacaaattcatgaagagtagaaattcctaagaagtctcacttttcacaaaatggacgaaattaatcaccaaacattcagcaatccctaaatatacaattaaatgggataaaaaaaaagttccaataattttgcactccctacatttgatcaaacaagcacttagttacttgatagttttgggaaaataaggttacaaaccaccaaaaaccaaaagtttcttactcaatggtgttgtttgtagtttagctagttctcttcatgagatagggattgactagctattatccatgtacatgtaaaaaaaaacatgtcagtgcactggaaggtgagaatttatccacttctagtaatgcatgtccttgagtaatattacaggtgatctacaaacagcagtacagcagcatcgcatcagcaatagtctatgattcgaccaaactccaaatctgaattgacttgactaattcttgcaagctcctaaattccattatcagcaggatggtttgcacttgcacttggctcgccttcatgaatggcaatagctttcactccgggactcagtgatgacgagtcattcttcatgccactgtttctatcctcgtcaaactcttcctccatgaaagaacccttgcgacgaagctccttcacttttagaaactcatcataatgggcccgtctgtgctctttaaaactcaaactcctatctgaatctggcaatcacagaattaaacgtatagattaactcaaacaatggaatagcttttccataacttgcaagaaacactggatggtagagtgttatcctggtgcctggtgtagtggaagaagctaaacagtgaattatgcgaagatgtgtgattaatcatcaaagacactggcagccattagtttttttcttaatgacaaagtctctacaatatttctccggaaaagaaaataaatggtaaaagtggaacataccatcgaagattgaaacaaatagtgtaggatagtttggaaaaaaaaaacagtcttgaacaatttcaaccatctaatacccccactcaactatgatatattgatatgacaagtctttccctttaacttttgatggatagctacaatcacagtgagggccttagaacacgaaacacggaaacttgaacaatttcaaacatctaataccaattcgactatgatgtgactagtcctttccctttcaactttcaatagatatccacaattatagggaggcatggcctactgtagcaccccctttattccaccattgattaaagaagttggagcttatttcaccagaaagagatatcatataacagtttaagacctgaagtgattcaaatatgaaaccaatgaagcaatgaacaccaggtccaacactattgtggaaaaagtagaattgtgggatacctgccaacataacttgccatgtttggggctcatataatggcatttcaggaaaacctaggtttaacacacctcttcgtatatttgttaagaccatattaggactggtaaccttctaacatctcagctttatttacgtaaaacttacgtatctgatgacatttcagttgtctcatactcgtatttgtattctggtacccccgaggaagccaccatcagtgcacttgattttggtctttgtctttatatcctttcttcacattataagtggaaacttagtaaacacctatgttagaccgacaccttcatttacctcaaaaatcacgtgtcgtctcatgtggtgtctgacacaacacttcacttggatatttcattttaaactaagaacttgactttttctacaaaataaccgagtcggatacttggacacccgtatccaagttgacacttaatccgtgtctgagtaacataggtaagcgcgcaagcaatatgccaatgtaatctatgatacctgatagattggccgagttgccctcttttccaggtccatgaaaggctttatccccccccccccccccaccccaacaaaaaaaaacaaccccacccaaaaaaaaaaaaaaagcttctgatgcaggtaggggcacaaagaatgagtgtcaaaacgagactagatttctgaactgctattgacagcttcagttgaaatttgagaacattagtatttgtgtggacacttctaaccattgattcgaattcctgcagcagatattaaggaaaatattgatcctggtatagaattcctcttccacaatagacatgtttgaggagaaagtactagcaatctcacaggattctttttccaaataaggccaatataacaaaagccaagggcccttgcgatgtcacgaaaagtctgctcccccgaagctagaagaaattttatgaccgttcgagccacaagttctggtttccagatttcataatttgaactagcaaaagtagcaacaaagttaccatccaaacatacgcatgcaattgttgacttagagaaaaagacccaaaaatttaatgaggtcaacaaactcggtggcgtatctaggaattgagccccgtgggttcagagttgtttgaaaaaaataataaaaacaattcttattctaaattactcttacatattattatattataattttttaaggaaaaggctattagaacccctaatgttgcatataagaagctaaaaatggaaaaagaatgcattaactgatcatttattgaatcgactaatgcatacttttgtcacaaattcacaacttacttccatttaaggtgatatatttgtaaacctaattcaaggcattcaatcttattatgtacttcttctcctctacttattctgtagtctaagcaatcttgtactagcatactgccattaaaaaaatcatactttgggagttaattcattcattattgtatcaaattcaattctgaaaagaaaagaaatggaaaaagagcaagtgacaaaacatgagttgtagttatgggtagcaactagccagactattaggtttgtttgctgtagtaacacgtattgtaataaaacaagagacaatatgggaaaaacaaaacaaaacatcccttgacagcttcgaacctgtgaccttgaaagagtttactttaacatgccacgagaagttaccgctgagccaagctgcagtatcaatactacaggactcatcttttttatataagcctatttcaatttcttttagtttctcatttacgcccagttttttggccagatcctggtgggtttagttgaacccacgctggatccgccactgaacaaactccatgtaagccaaagaagtaaattatatctagtaatgaaacaagatatagtagcatgactcatgtcaatagatgagtagtaattaatacattccagatatcaatgagaaactagctggaacttctaattatgcagactaaaatgactagatttcataataaggagtagcaaagtaacaaccgtgatacaaacaaagaaatgtgagagtgagtaagaaatattaccttcatcatcctgctccataacatctccttcatcctcagacgaggtccagccaccagatccattagctttcttgccactagaagaagctacatcgtccaaggcatggcttatggctgcagcatgctcagcatcagcaatacactcgtcaaaggcactacgtataggagacagagaacctaaacaagtcaaacagatacagaactgattcagaactagagacaaaaaaaaataagaccagttatagcaaaggtcaattcaagatgcttagagacctcaaaaggtggacgaatgaaatagaacaagtgatctttgtcaagcatttctttggctcagtgatcttttgccttacgggtttatttttagggtaaaatagaacagtttgtcttcaatcatagggtgatatagaacaagtataaatttaagatggttaccatcatcttcaatcatagggtgatatggcgtctttggctcagtgatcttttgccttacgggtttatttttctcgatgtcccccaagttagtctcatcccaccttacacgtcctctgttcctgaaaagagcacatacctcaaaatatgtgatgcttacataataatatgatttttgtaaatttatttattgtgcccttatacttgggacagtttgtgcggtagactttgaaattcacatcctactcttttaggactagattttttatgttctgagcttttgtaatatttccagtcaatttctctcttcctctatcctcttatctaatccattgtagcaggcacccctacccttactcatataccttaatatcctctaacttcaaccattctaaaaccttacagtcaccatctaacccccaaccatccaaactgttgaacaacatattctttctctaattgatttcaatatctttttttttgtctcactaatctacaatttataagaattagatttgtcaagcattccattccccgtggatctctaattttaatgaagaaaattctaattccaacttgattcgatttccaaacttttccagctgttcttaggttttcatttgtaatttgcacattgaagttaaacaatgccatcaaatttagcatcaaagcaacagtgtcctttctttttgtcagtttcaattgctggttgttaatactccacgtggcgaacaccgtctttttttttttacatgagagttgtttatttggatgcataatcaaagccgttctctgaacagcttaatgctggaactttcttcttgcttatgagattaagtcttttggtaaaaatgaagcttcgcttcttgtggactttgaccataagcagattttgccatgggccatgataggagggggtgggtgccactgtctgttggcttattgtatgcagagacaagggaaaatttgatgcaaaagttgattgaaggttatgtgattggtcgagcttgaaaagggtatcacacaattcacaaagttttgatcaaccaaaaaagttgccaaaagcaagagggtgcaatggtccatgctgattttctactttgttctttatatattcactaaattaccataacaagtaaaaatcagatcaaaaagacaaattgcctaagcagagtgacaaactaaccacgggcgaacaggtaacccagttttttgggtcagaacaatagcgacctaagcaattatccataaatttcatctagtactaagactcacttgtatttgtgttcgattattgtctacttgttttaattaaaaaaataacttttcatcccttggcctttacgtaccaagggatcagattctttactcaccaacggatcagattattatttgatcatttggttgcatacaggacaatttatcaggaatttgcacttccaatgaagttccatttcctaggagattgcaaaactgtttggttgattgtaggaagttgtaattcctgtaggaacttctattcacctagggggactaggtaaataacttcctatgtttttgttaaccaaccaacttgacatcttttgaattcctagtaatttacatttcctatgtgattcagcgtcaaccaaacgaccaataagtcagttctcacttccatgcttcaaggccttcaggcttcagatcaattttgttcattgccacaaagcacatgcatagggaaagctaaaaaaatgacagcagtattgcaactccgtaatgaactctatctttctcttattgtctgcagtttccttaattatcttcgaatgccttttgtcctcagcttataaggaccaagtgttagataaacacagctctcgctttcatgactactaacagcattgtggtacactgtagcaaaacacacgcacatggatagaaacaacgacagcactagcacaagggagcactaaaaaatacttagtcctctgattttgccacaagggaacacatgcaccatcttacaaaaccaggtttacgtttatcatatccctaattaatctaataatctccctcaccgtcttatccaaatcccttattctgcaacctactacataaagtaggcaatcagttgaccagaactacacaatgccaaatattatgttacagtgaatactcaaacgacaaacccaaaatctccttttaaccaggtacatttccctcctccttatacagaactacaagaggctgaccagatatttataagaaatatacgagcagtacaaatttttaagtttagatatgaacaatgatatgcgactaacttaactgaaagaattaagagtttagagacatacttcatcattccacactaccaatcttcttgaaaggttggcacaacgcaaagcaggcaaccagcagctaacttcctctgggagacacacagagtcagttatattaccaattttgacgggagtggattcagctccaatttaattttagctttttttcttagaggtaaatgtcaaaaaaaaggacagaaatgttacatttaaatgtcaaatgcaacacattaaacaagtcatacttgcaaaacacatcaaacaagtatatataatgtgtctttttggtgctatatatacataatatgtgatagaaacaagatataagtcatataacaaaattcccaagtcccaacccagaacaagaagtaacttgccaacttaacattttcaaaactcctgcacatggtctcatattttcaaaaaaaaagaaaaaagtacagaattccaaagaaaagcgatagccgtttacaagactagtcacacatagtggtaaatccgagaacttgcagatggtgggtcactaccgaataatgaatatcaaccacttgtaaccaatccatgaattttttttgataaaattacttcaaaaaaatatcatgccaaaactaattcatattacgatagactagtacctaaaaaattgttacaattgcgctcgaagagttctacatgttttgatattgatctgtaatatcattcacatttcacgctaactttcaaaaatcaaatctctttgtagaaaagcaaccacacaatcattcaacattagatctcccagctaggatttagagtatatattgttttagtaaagctatttgtaatattctgctgtgttttcatttttatactagagtttgaattagatttagaaagccaatttcgtcaaaatattcaatcaattcttatatcaaacaatatacaactcgttgtcagttgttattaacaaaccaacaatgcaaaaatctacccgtcaaaaaaaaaaaaaaaaaaacaatgcaaaaatctaattaaaacatcaattctcaaatagcaaacaattcgaattagaaaacttaattatgtacaaatcatcaccaattcttaaagcttggaacttgataaattgattaaggaataaaaaaattaacaaccaattaaccatgaacaacagcttagaaacaagcaattaacattatggtttaggaatttagattaaaattacaaatacctaattcgaattctttgagttaactctacaactaaatatcaattcttaaagattggatatcgataaatagagtaaggataacaaattaacaaccaattaacgttacgatacattacctaattcgaaatttaggtatttattcaattgaattaggtcaatgagattcaagtacgaacaattgaaaatatcatcaagtttttttagtattggaacaattaaattgtcttaatcattttaattgaagattcgacaaattaaatgcccaaaaatctaaataaaaaaaaacgtagaaaaaggaaagacgaaattacctgagaaatgaatttttgaaacagtttaaccgaaatgacctagataagatttgttctacagcacacagattgtgggttaaggaagaagataatagatgtagtgatgttttttcttcggatttttacgttgaccctaaaccatcctttctagttctagtagtatatttttctgaagttctaggtatcgtttggttgcacttgggaagttgatcttcccttgatttttcacttcccatgaaatttaacttcctaggaagtagacaaaattgtttggtaggctatgggaagatggaattcccatgggaagtggcacttacctagggaactaggtaagcaacttcccccattgtatgggaagtagaacttcctaggaagtgcaaattcccatgattttgtcaaccaaacaacttcatatatttctacttcctaggaatttgcacttcccatgatttattttgtcaaccaaacaaggccctagtatattactacctccatttccaaataattgttacggtttcctttttctagaccgtttctttttaattgttactctcttatttttttctacataaggtaagggggcgtttggttggggggcttcatgaaagggtaagggaaacaaagctcttgattcccttacttgatgtttgtttggtcattttaatcattctttttaccccttcctttccccccaaagtcctctacatccattccccacaccccttagggtttcacttaccctttctctcctctacttcatggtcaccttgaccaatcattgaccaccacaccaccaactgaactcaccatccttgccaacagaaccaccacaccacctaaactcaccaccctcgccaccacatcgccacctaaactcaccaccctcgccaccagaaccaccacacgtcattcgaaccaaccggaaaacattcccccgaccatctaaccacccggttagccacccccaccccttgaaaaccaccacccgattagccacccccaccccttgaaaaccaacaaaacccactcaaaaaaacctcattcaacccacagctgtcgcggaagaggggagggaggaagaacgttgcgccaaatgtaacaacaacctcgcacaatccaacttaaaaacccaactctaatgattaattgggctttagatggtcggattcgaatctgaaatttttatggtcgaatttgacctttaaaacctcaaatatggtctttaatggtggtagagaaggaaaacaaggggagattgtgatgggcggcggtgaggtggcgatgtgaggtggcggtgaggtggggattgttgtgcggtagtaagagggaggcgttatgagtggcagtgagagggcgcggcggcggtgaggggtgggggttgtggtggttgcggtggtggtggtagtacttgggagagataagggaagtatgtgaagaaaaatagtgggaggataatgaagatgagttttcaaaccaaacaacattcttcaagaaagggttttcttttcctttctccttgtttctctttcttaaaccctttccctttccccttcataaaccaaacgtcccctaagtttgcaatgattgttacccactattggtccccttgtggtccccaacctttaatcccaacctaacctttaatcccaacattaccccccacctaccccatttaataaactgagccctaattaaacccccctcatcttcccttcatctttccaacttctttttcagatctctctctctcctccaagttcttgaacattatggatctctctctctcctctagatttgataaaaccctaaaaaatctgggtaaaaaatcatctttccttttcgtaattttcaatacgcaacagaaattcggtcgttaaattcattttctgatctctctctctcctccaagttcttgaacattgtgggttttgctctctctctctcttgtagatctattcaaaccctaaaaaatgcgggttaaaattcatccttcatttttgtaattttcggtttatgctaacccttacatttctgggcttgcaaaattcattttcggggttctctctctctactcgaagttcttgctaattttggatttcactctctcttctctagatctacactaacccttacatttctaggttaaaatcatctttttttttgtaatttatgctaaacaacattcatgtttttttaccagttgtattcggatctctctctctctcctccaagttcttaaacattctgggtttctttttagggttcttgggtaattgttgaactcagttgtttttcatggagagttcttcaagatctaagcgtcggagtagtggaaataacggcaaatcttcatcacttctttccatctctattcctgttactgaccttgcctaagatatcccatgttttacaaaatattcctaacttagtacagaatgtttttgaacttagttgaaaagttgacaaaaaataacaatttccattccacgtgcaacttcattctgcattccatgtgcaacttctaatactcctaatctgttgctgcctatacttgttctgttgcttgtacttctgttgcatgtacttttgttgctgcctgtacttgtggtgctgcctgcccatgtaaccaatttcttgcttgatccaaaagtgtttggggtacttcaacttgtaagggaagttggctaagactttccaatatttgcttgttgacatgtggatatgtgtagttgttatttcccctaactttcaaaatttcaatcatatggtactgaaatgaatgccatacattagctaaagtatttggttgcatttcttcaaatgacttgttaactgcttgcaatagctttagtattgtatttggtctttccttatgttggagtgtttgtaatgctctaaagaaaccaagatccaacatgtttagctcaggactatttggtggttgctgcaccaaatgaaaaacaaacccgttttgtctactagctagtaaccatagtgggtctgatgcagttacatgtggctttgcgttgtcctgttgtatgtatattaccctgctcctgtgtggtggccacttagccattattgctggtaagatgtgattaattaacacatctctcttgtgtccttggtgacattggtgattgcttttgtctctaatgtgtcggttggcctattattagatgacctctgtgctgccacttcctccacaaatgggaagataccaattttcccatcaaaagtgcattgacccaacatgttgtatgatggtctagccactgcagtttcaaacatcaccttaattatatgcctttttgattggcatgttctcaggtggattaacttcatttggatgcaaatacagcttttgtgttttttgatgcatgtaaaaccacttctcaccgatgtggatgaagttgaagaaatcattgaacattagttaccctccctctacttgtggttgttgtagcatacatagaatccaaatgacccttgtaatctgattttctggtgataattttggacgtattggattactgtgtggtcgtatgttgccttattttactagtctccacacagtgcttgcacaaacacccagtttgtttgcaagatctcttaaattggttctgtccctaagtggaattgaagttaacatttgttctgtaagtgtgaaccgcttcctgcccactatgcctgccatcttgttcttaacattgatttgtcgttcttcaccaatttggttcttcattgtgttccagattgtacttgcagttttgcgggacacattgaatttctcagcagctttagtgattgcaccatatggtagctcagtcccgttggcttgtcctaataaaagctcagccatttgttgcctctgttcatcgctcaaccaaggccgaggatgatgcgaatcaagtacaatgacatcttcatttgtgatatctaccatttaatgcacctgaggcaaaaaaaaacccccccaccccccatttgtgaaaaatttaatgcgttaagtgataaacagaggcaataaatggagaagaaggaagagagaagataagttgctgggtggagtaatggctctgttaaatggaccctttaagtggggaagttgaagtgtaaaaaagtttgaatttttttccctccaaattctggaattgtaaagaaggactaaatgtttagatattggagggaacttgaaatttccctcaaaaattagacatgtaacccgccaagattaatgtaaaagagttgattactttttccccaaaactatgtgctaattatttctctctcctccataattttttattgttcttttgtacttatctctttctacttttcagaatttttaacccctctctcctacttttcaccttttgccttggttctaatgaaaagcaaagtgtaacaattaatttgaaacggaggtagtattaactaacgaggcgtttggtatgagggattgggagtttggggattagaggatcggattgggaatgggagtgagaaggtgggaattcattaaatatatctcaatcccttgtttggtatgttagtgggattatgttgggaatattattatcccatgtttggtatgaggtacttaagtagggaatataatgctaagtcacaaatttacccattttaatgaaggatagcaaaagaagagcaagcaatattggtgaagtatattttaatgaagggtaaagccgtcttttaacataaccataaataatccccctccctaatacctcccccatgtcttattttggtggcctagtgggataaggggggttaatcccattccccttcacatgggaatttagatatcccctcaaacaaacatgggatatctacctatgggaatataatatcccattcccaccccctaatccccctaaacaaacaccccctaatccccctaaacaaacaccccctaacagattatctctattctatatgttaagaggagtaggacaccaaaaatctaaaaatccctgttttaccccaactaatgaaacaaattacatccaaaagaataaaggaaaaaaaaaggagggcaaaaattaaaagagatacgttgatttttcaaatcagtaactttcccaatatcataaccgtttttttatacaaacctctcatttagtagaaaaatctcatgataactgtcaatatgcacaagatatgtagttaagcactccaaaattttcgagttctccatctcttcccttccattaactgcaaataaaaacacaacaatattagatacaatttgttttttccaaggccaagagtgaggtgatttattcatataatgtttgttcttcataatataattgttatcatacatttatttatttgttgtgctttaatgtcaacgtaattgaagcgaaccaaaaggagcaaaaagaacagtgtaacagaggtaatcacatccaaaagaccaagtttcgtaaaccaaatatgagcaaacaaaaatcaatttgcaatcacatctcagttttttgcaattaaattggtgtatataattcgttgttcttgcctgcaatttcttgatttactactttcacgatttcatttatacctagaaacccctatcaaaatattactatttttctccttgttttgaacatgacccagaaaaaaatctcaaacatttgctgcttatttgtaacttttgatttcgacccacttgttaaaatcacattctaagaaaccccattatatatttgtggttgatggtacataatatatgagaacgtattgtgtcggactcgtccgacacaacactctcatcggacgagcaacgcgcgcgacttattaaagaccgaaaaaataaaaaaaatataaaaaaacactctttcatccccttcatccgcttcatccgccattgttcaagaacaaaaacatatccaacacatccactttctcactacaaatctagttccactactgaaatctagttcgttacaaattgaacaagaatgtcaaccgaagattcgaattcacaaatcgcaagttcgttacaaattgatttgagcaatgagaatactcacagagatctcacattacaaattgaactaaacaatgaaaacatacgaattctacttggtttgctcaaaggaaggaggctcaaaatcaacaaacaaaataacagaacaaaaagaaaaagacacacaacaagaaaaacttgttcggataccggatgttgagcaccaaccaacaaaagaaaggaaagagtagtcaatgaaacaagaacaaagatgcaaagccatggtcgatttaagcaagaaaaactcggtgaagactttgttgtagtagctcatgagttgcaagacaaccatgagttggtaatacaacaagaaatacatcatccgaaatcgaaaggaagataagctgaacaaaaaggacaactaatacaaacaatggttgaatcggcataaagccaatgcatgcatacaactttttgtgtcatgaggctggatcggaaagaagtagtgggccacacaaaaagggaccatctaaactatatcacacaagtcgaaacaagattggttgaaggaaaggatatgcagagtgtgttggacttacttgaaagaaagagcggatgatgatcccgcattcttctacaggctgaaatttggggaacataacaacattgtcggctacttttggcgagattcaatgatgttggaggacttcaaagcatatggagatgttatgatatttgacacaacatataggacaaacaaatatggaccgatatgtgcaccatttgttggcataaattgccattggaaaacaacaatgtttgcatgtgctttcataactaatgaaaaggaagagagctttgaatggctactagaaacattcaagagagcaatgtgccaacaagagccaaaaacaattttcaccgatcaagataaggcaatgggcaatgcaattgaaaaggtatttttcagttagaattatttaatttttcattagaataattatttagtcttgatttgagttaattatttataattcattagacttatttataattcagttagacctatttagttttcatttagactcattaatttttcggatagccttatttactttttaattagactaatttacttctcggttagactaatttacttttcagttagactcattgagttttcggttagacgtatttagttttcgattggactcgtttagttgtcgagttagacttattgagttttcgattagacttatttagttttcgattagactaatttacttgtcggttagactcattaagttttgattagacttatttagttttcgattagactcatttagttgtcggttagactcattgagttttgattagactcatttatttccactatttcagttagacttctttctttttggttagacgtattgattattcgagtagacttagttaattttcagttagacttatttagttgtcgattacacttatttacttttcattagacaaatttacttttcagttagacttatttagttttcatttagactcatttagttttcatttgggcttcatattacttctttttgtctaatgaaattttcattagcatttacactgtttttcgagttagacttcttaatttttcagttggtcttcatattatttctttaccttttaaattagattcacaagcattcaaatgaaagtgatttctagcataatatgtactatcttaaaacaagttttcccaaatacaagacataggctttgcctttggcatatagagaagaactttgtaagccacttcggatccctcaagaccaatgaagacttcaagaacatgttcaagaacctgtttgatggggtgtcaaaatgaatcgaggctttgaagaattgtgggcgaaaatgatggaattgtatggacacgagaaaaaggaatggttcgagcaagtatatgatcgagagacacaagtggtgcaccgcattaaacagggatatgttttcactggaatcttatcatcacaaagaagtgaagtcacaaataaggcaatatcattcaatgcaaaagcaacaacaaacctgtttgaattctatcatatatttgagcaaacaatgaaaagatggagaagcaatgaaactagtgacaacttccgaacaggccgaacgtcccaaagccgtcaaatccaaatcaaagcttcaaacatgcaaactgatgtatacacactagcaccgtataatgactttgaaacagtatgagtgggcaatggcatcatttttacgagcatttgcaacagaaaactcacaatgaagttgtttgaagtctcaccagaagaagatttcaaagaattcacatacaagtagcatacgatgaggcgacaacggaattagtgtgctcatgtcaatgcttcacgagagacggggatgctttgctttcacataataagggtcatgcacatgttcaagatatttcaaataccacaacaatatatccttaagagatggacaagacttgcaaagtcagcagtatgggagaatgttcaaggttagtgaaataaatcaatatgactaactgacaaatgaaagcaactaatcgaaaatcgaagactccaatcaaacaattaactcgatcacctgaaagatttaattagtgaactgaaaaaaaaaaggctccaaatgaaacattactataactaatcgataaattaatgttactacggaacattaattggggtttttgtttgtgtgtgggaggggggatattagtggtgggggttttggggggtgtggggtttaacacttaactaatcaaaacaattaacacaccacctgaaagaatttataagctttacgaaaaatttagttagtcaaatgaactaattgactaagaaacatttattaaagcgcataaggaccaaagccaaaatgcacagttgtggacaccatggagacatgcaataaccaagaatttctacaacctagtgtcaatatgtcaatcaaatgaggatgcaagaacattatgtgacaagtcgttgaaggaattatacaaatcggtgaaagaagttttcaagactcgatcaacaaaaacaacaagaaatcgaagatgaagaactacgaagacaaacagttgaaaatcccgaggtgataaagacaaaaggaagaccaccaaagggaaacaagagagtaaaaggacattttgagaagcgtaaaatgaagacaaggcatccgaacgaatatggaacaaaaaccccaaatgtacctcaagttgaatagtgttcaaataatattagttttcaattgtattccactcagtaattgtattgaaatttacacttgtttattcctaagctactcgaaattcaagaatattagtatttattgtccttcgattagacttgtttatttttcagctagtgtttctagtgcttcacttagacgtgtttacttttaagcttatattaattcagtttcagttagacttgtatatttttcagctagtgttaattttgcttcagttagactaatttatttctcagcttatctttatactgcttcagttagacttgtgtctttttcagctagtcttaatgatgcttcagttagacttatttatttctcagcttatctttatactgcttcagttagacttgtgtctttttcaactagtcttaatgatgcttcagattagacgtatttatttttcactttgtattaattgtacttcaattagacttatttgattttcaacctctattaattacgcttgattagacttgtgtagttttcactagtgttaaatttccttgatcgagacttatttatttttcagctagtattaattgtgcttcactagacttctttatttttcagctagtgtttatagagcttgattagacttgtttatttttcagttagacttaacaactcctcgattagacttgtttgtttttcactactagttacaagtgtataagttagacttaaaatttatatttacaaatatatgtcatacacttattattatgagttagatttttcatttttcagttggtatttgtatttttccaattaattttcaaacaacttcatttttacacaaatgtattccattcaaagtaagtgtaaatgtacaattcattaaagaacacagatataaaatgtaaaatgagttctcagtactatttgtatcttgtacattgcaaaattcaatggtttctatttctattgtacattataataataataaaaaaagtttggcacctaagaataatgaaatttcaacaggttgctctattttcactttgtctccaaaattattattcaacatatcttctactttcgcctcatgatccctccttcgccgtaaaatgtgtgcttcttttctattcgtcttctttgatcgattaaatgctaatttatctagaacaacctctttatccttccttatcttccgtcttgccatcgattcgggtttctttgcgagaccaaacataacatcatgcttcactttctctttcagtttgtttaaaggatggtccacaagacgaagagcaagcctacaccgctcaaggtttttggtggtctgcctaaaaaataaaaaaatcaaaactattaaaaaaggttcaaaaatgtaacaattacaaaataaaactaatcgaaaataaacaacaacatcaactagtctttatagtccttcattgtttttcggtagtccttataatgctttcactagtaatgattgtgtttcaggttagacttgattgtttttcacctagtatttattatgtttcagttagacttgtttatttctaagctagtctttacaaaggtttgattagacttcattatttctcagctagtctttatagtgcttcgattagacatctttgtttttcaaattagtctttcaagtccttcactaactcggctatcatacctttttctattaaaaaactttcaaaaacagaaatgtaacaagcaaaatactccctaaaaacaataaagtaatcatacccttttaaggtcaacaagtgcaagcatggttagtattttgaccgtcatacggctccatggttttgattgcataaacaccacaatcaaaattgttgtccttgcttctccaagggaagtaaagagttgatgtttgccaatggtggagacgatcaaaatcacgacatctcatagtctctttcataaaagaatcaaaagcacgacactgcatttgaagataaaaaaaaaaaacaattaaaaaacaagtaataaaatggaacaaaaaaaaaatacaaatgctcataaaaaggtacgtacaaagtatgtaagaccgttaaattcctcatgcttatatctatcaatgtccttcatgtctcatacgattgtcaatattttcaatcctttttgctttcttgttcaagaccaagacaagataatgatcatccttgtgaacaggaacaaatatccggaagataaacataagatgcaaaagcaataagtctacccgacagagaacaaaaaacaaaatgaaatactaaaaacactagctgaactaaaaacatacactaaccgaaaacataaactaggactaaccgacaagtaacatacactaactgaaagagaaaattacactaactgaacaaataaaaaaatggttaacaataatacaactaaccagttcagcttctcgaatatcattccgtggaaatgatttcacccatgaagaaatagcttccttacatttcttgtagaataaatcatcatcttttgtaataagctttttcttgttttcttcccattccttaaacttcgatcatacttgactagtgccctccgggttcttcaaaataatctcattttcagcaatctcactctcaaactgaaccttttttaccttctcaaagacacaaccaattgatatagttctacaacaaaagaaaatagatataatgacaaaccgaaacattaagtttagttttcagttagactttttaaaatgtcggttagatttatttacttttcagttagacttatttacttttcagattagactcattaagttttcagttagactcattaagttttcagttagactcattaagttctcagtgagactcattaagttttcagggagacttatttacttctcgattagacaaatttacttttcagttagactcatttagttttcagttagacttattaagttttcagtaagactcattaagttttcattagactcattaagttttcagttagactcattaagttttcgattagactcattaagttttcagttagacttatttacttctcgattagagtaatttacttttcagttagactcatttagttttcagttagacttctttatttttcagttacacttatttattattcagctagacttattaagttttcgattacacttatttagttgtcgattacacttatttactttttattagactcaaaacataatatgaccaatcaaaaacataacatgacaaactgaaaaagcagaagatgaccaaccgacaaaataatatgaccaaatgaaaacaaacatataaaactaagcaataacaacacttacaaaaggcataatattaaaccagaatctccttgttgcgaaaggtgattcctcttcttacctattgaacatgaaggcgcatccgtcaataactccacttgtcaccaaccttgacgaggcatgctaattaagtcgaacttgtacaatcgaaccgcatagttgctatgaggattatcaaaatccacaatgagatcactagttagttcactttgcataatgtcatttttcatcttcacttcctcgaaatctgtatccaatgacatatatgcaacatcttcatactcattgtaaaatagataatcaaccaaagaacctctcggtcagagacagatcactcaaatatctattataatgttgcaaacttcgacacaatattatgccatggttgttgacagaagcgagatgcaatccacgggtagaagatgaaacatcaccggcttccttctcatcctcttcttttttacccttgtcggaagatgaaccaactccttgatcagcaatcctatcaatgaggtcctccaaaccttcatcgtcataatcatcacccggttccttaaccctcacaactttcccaactttctctcaagtagggtcatagtcccaccccttcaataattcgggtgttgaagggatttacactttgattgtttcgaggtttgtaggatttgtatgatgattgatcgaataagagccatcaccccgcattcaattaaaatattaaaaaaggatgacagatatactaactgaaagataaacatacactaaccgaaattagaaacagatactaaatgacaagaaacataaaccaaatgaaaattaaacaattactaaccgacaagaaagatacactaaccgaaacataacataatactaactgacaaaaacaaacactaaccgacatgaaacttacactaactcaaacataaaccgatactaaccgacaacaaacaaacatacactaactgaaataaaagatatactaaatgacaagaaacatacactaaccgaaacagaaaaataaacaaattaaaacagaaactaaaactatacttactcgaggatattttacatttacttggagtgatgattggaattgaacttccaacaccctcaccactctctgcctttgtatggaagatcctcaacaacgggactaggagttaatagttggaatgaaggggcgtcgaaatcaagcaatgtttttccttttagcggaagaatcaactctccaagactttctgctatatacattctcaacagcttcaacaacgggaggaggaggaggaggagttggagtacgaagatcaacaatatcaataccaagaggtgcgagtagggacgtgtgtagaaattttacacttatccttatccttagcccctttgacttgatcatcatcagcattcctcctcttcctatcagcttcctttggttgttctttctcaacatcttaattcaaaaacaaaaaaaaaaaaaaaataaatataaaaagttccatttgatatttatatgatattgattggtattaagactatttcgattagagtatcaaaattttcagttggtccgaatattctttcagtttgacttctttattgttcgggtagtctttatagtccttcgattagacttgtttatttttttcagctagtctttataatacttgattagacttatttactcttccgttagacttatttattcttcaattacaccgattaagtgagacttattaagtgttcggttagagtaatttagttttcggttagacttattaactcttgattaggcttatttacacttgattagacttattttctcttgattagacttatttactcttcgattagactaacttagttttcgattagacttatttagttttcattagacttattacctcttgattagacgtatttgctcttaagttagaccgattcgattagactaatttagttttcgattgatatacttttcgattagacttatttagttttcgattagacttattttcttttcagattggtccttaatttatttcatttagtagaattattcttttatttgatactattacaatcattttcagctacactttataatacttcatcaattattgttcaagtaatctttatagtgcttacttcctatttatttttcattcgttttcatattgttacaaactaaaacagtatttcagttgctatttataagatattatttcctttagagcatcacatttttcgattggtctttgaattctttcaattaggaataacatgaaagaaacttacttcctcctttctctccttctcgcatgaaccccaacatccaactccttatttcctccttcctctttatctccttgaagaccacaatcatcatcaagattgccagtcttcttattatcatcttccttcggttctttctcattatcttcattcaaaaacaaaaacaataaaaaaaataaataaatacacaataaccgaaaaacacaaaatcgaaaatgaataaattcattgacaaactaaaactatttttccaccagattaaataaaaacaaataccaaaagtttcatttggtatttatatgatattcagctagtattaatattatttcggttagaatatcggacttttcagttggtctttttattctttcagttagctatttaactttttcatttaagcaaactaaaacaatacaataagaagaacttacttccaccttcctctccatctccatgaagaccaaagcatccttatctcctactttctcttcatctccttgaagaccgggatcaccattatctcctcctttgtcttcatctccatgaagaccagcatccttatctcctcctttgtcttcatctccttgaagaccgggatcaccattatcatcaagcatcatcatcctttgtctcattataattccggtgatccttatcatcaccatcatcatcatcatcatcatcttctttatgctgatcatcatcggcattcatcttcttctcatcctcctctccttctttttcatcatcttcattcaaaacataaaaaaacaactaaatacacataaatcaaacaatgtttccaacagatgaaaaaaaaaataaactgaaaaaatccagcaatcaaatgaaaacttaagtgaattgaaaaaattcatttagtattcatctcattttcactggtgttcatattatttcagttagatcacaaagttttcagttggtcgttttattctttcggttagagtctcaaagttagctatttcacttcttcgattaaacatttctttcacttagagtctaaaatttttattccaaccaaattacaaaactacaacatgaaaataatataatgaaaggaacttacttccttctttcaaatcaactccatgaacaccagaatccaaatcgggaacattttcaattcttccaaactccaattcaacaggccgcttcaccaatagtgaaattgtaggatcaactttgtttgcactgtctttcgcttccaaatgacgcttgcatatgtcgtcaatttgactcgaaaaatatgggttaaatacttcactatcatccagagaaatacttgtcttgagacgacttctcgccttcctcccgaatattcgggcaatctccaaattcacttgacagaatgcaagcgcattcctcttcaacttgtgcatgttcttcacatattccttcaattaaaagagcaaaatagaataaacaaacaaatcaatatgatgatgacacgaaaaacaacataaacaaaaatataaggaccatctgaaagaatcaaactatcaaatgaaaacttaaatgaaatataaataaacttatttagttttcagttacactaatttagtttccagatagactaatttagttttcagttagacttatttacttttcagttagacttatgtactcttgattagacttatgtactcttgattagacttttttagtttttagttagacttatgtactcttcgattagacttctttaattttcagttagacgtatttacttctcagctagacttatttacttctaagttagacttattaagttttcagttagactaatataattttcagttagacttattaactcttcgattacatagtttcagttagacttctttatttctatgttacacttctttacttttaagttagacttatttgctcttgactagaaccgacattatttcggttagaggtcagtcttcacttagagttcaagagtaaaagaaataaaaacataagataaatgaaactcacagggaacatcaagagcatctatttcctcatcagtcatcaaactatgaggaagatccatgataagttgcctagttgaaggtgatggaccctcaaccaccttaattataggagaaccaggacttcctactagcaacactaacactgggagttttaaactcaaccttctgtttttcacacttcaccgtgagaataaaatccatgttgatctcaaaccgcttcacaacatcggcaaaatccttctcatcccgccaataaccgataaatggcttaccgacatttgaataatccagatacgacacttgaagttgtgaataacaagaagagtcaaagcgctcgacgcatccccgaagcttgaatgatactttcttccgtccaagctcaatcttcttaatcataatagactgatgacagtccaaaacaccaaagacaaagacttctcaatatatatccacaccagtcataacttgaaattgcagatgcatcttctaaactcttggcacatttcaaagacaggccctaaatcggctataggacatagaagcttggacaacgaaaaagataacaaataacttcttgaaatcatccccgattcatatttcttaaacaaatcatcccaattttttctaccaatatataccttcttgggatcgaaataccaagaaacctatgccaatccttcctggcacttccagcctctatccgactacctttcctcctaaaggcgtcatcatctataacctctactgctctatctcgacacgggtaaccccaaaacatcactaatggtaaacttattaaaaatcggtttaccattctttgttgaaaacatcattccggatgcattgtaattcaacaacacctccaaattcggattaggacaaaacttctttatcctaatatctaagagactcccaaacccaatatccctaatgtctcttttttgctcatcactcaaattactaaccacttcatttaaatgggaatagtcgacaatacttgtagattaattgactttatttcttgctcagtgaaattcctaacaaaagtgaacaaaaataactttaaaacataaaaaaaaacacaatcatataatataaaaggagaataatgaaaaaaacatacgatctatcaaatgtgtctttacgttgatcgggattagatcttgaaaatgaaaacttgattggtgataaatcgatttgcctttcttcttagacaaggatttatcacatctgaaagaaagaaagtttaatcaaacaataaaactaactgaaaaaatacaaagatcaagtgaaagaataccaacatcaactaaaagcagaccaccatcaactgaaacaatagcctagattatttttaaggtagtctatatagtgctcgattagacttctttgtgtttgagatagtctatatagtgcttcaattagacttgtttgcatttcacttatatagattgtgcttcagattagactagtttatttttcggttagtctttacagatccttcaaagtaacttctttatttttcagctagtatttgttgtgcttcaagtagccttgtttatttttcactagtctacatagtgcttaagttagacttgtttgtttttcgagatagtctatatagtgcttcgattagacttgtttatttttcagctagtctatatagtgcttcgattagacttgtttgtttttcgatagtctatatagtgcttgattagacttgtttgtttctcagctagtctctacagtcattcaaagtaacttcattattgtgcttcacttaaacttgttgctttatcagctagtccttattatttcatttagtataattattctttcatttcattctattccaattacacttaaaattttcattgcaaatttacattacttgattagacttgtttcttttatcggttagtcaatatagtgcttgagatagacttgttcgtttttcagctagtatataaagtgcttgagatagacttgttcgtttttcaactagtatataaagtgcttgagatagacttgtttgtttttcgatagacttctccttttgtcagctagtctatatagtgcttcgagatagacttatttagttttgattaggcttatttagttttcagattagacttatttagattttagttagacttatttagttttcagttagacttattaagtgttcgattagaggtaatttagttttcgattggacttattaactcttgattagactaatttacgcttcgattagacttatttactctttcgttagacttatttactcttgattagaccgattcgattagacttatcaagtgttcggttagagtaatttagttttcgattagacttattaactcttcagatagacttatttacacttcgattagacttattttctcttgattagacttatttactcttgattagaccgattcgattagacttatttagttttcgattaaacttatttagttttgattagacttattaactcttcacttagacttatttgctcttgattagacttatttgctctccagttagacatattcagttagacttatttagttttcaactagacttattttcttttcgattggtcttcttactacttcatttagtataatgactctttatttcattgtttttcaattagactaaaaatattcagttaaaatttacattgtttcagttacactacttcatttttcagttacactacttcatttttcagtaacaaattaaaaaacaacaaaagaaaggtagaaatgtctaaatgaaactaaacaaaatcaactgaaagaatataagaagcaactaaaacaatactagaatcaatcaaacaatacaagaatcaatcgaaggaatataaatatcaactgaaaacaacatcaactaaaagaatacaagtagcaaatgaaagaatattataatcaatcgaaagaatatataaatatcaactgaaaaacaacaacaatcgaaaacatgtgtataaaacaacaaaaactgaaacacaaaccctaaaaacatgaaataaatactcgataaactgaaaacattcaaaaatagaaaaaaaatatctaaactactataagaacttgaaatctaccttggatcataatcaccatctttctctttcttcttcccagcagtagacactgccaaaatttttcctgaagatccaagactcttcaccttcttcgacttcgggctacattacaattacaacaacaaaaacgctcaaattttgaaaacaaaaaaaaatttgcagcaaaaaaaacaaaattatacctagaatcatcatttctaatcctcttcaccatatttgcgatgcaaacgtaatgaattacgaacaaaaaaacacgctaagtttcaacaaagcagagaagcggagaagcggaagagagagagcgcgaaaaattctagaaataatcgagtaaataatatatcggtttctttgaaatgaagaagaatcagttttaaaactagcgagaatcaagtagaaatccaaaaacagtttcaaaatcgaaaaaagataatgacctaataaccgttatatgttttttctaaaaataaacaaaactgctgatcaacaaaacaaatatgaaaaaaaaagaaagcccgcgcgtttttgatggccaggcccgtccgacggaagctattgggtcagacggtttgacccaatactttcacatacacttattgtgtgaacttacttgcttttttttttattgttcttatgctctaattaatgaagctagtgttattccatttgcacacccttgtactatcaatatatctctaatatataatttattttataatatgttattatagatggaagaaaattttatcaatgataactaggataaattagaaaatgagcaagttcaccatgataacgaggatagtgagtttgaaaataaagttggttgtgatttgggatagaatgagaaatttagctaccatcaaaatgatttgtttagttacatatggattatacctactacgaaaaaaaaaaacattatgagttataatcatatgccttcaagagaacaaacaattgaacggcatgcaacaaggaaaaactacattatgagttttttttccttcctattcttccaaacataagatttctttcctttccttcttattaaccaaacatcataaagtttagttttttttttcctttcctttctttctcgtcccttcccttcctttcccttcccttctttaaaaaaataccaaacacattggaagaatcgtagatgaacggaagagagagaaagagacttacttgagaaccatgattgttgttgctgctgagaaattgccgctgtgatttcagaaaccttaaaggagcaaaatataatggtgctatgaaatgtcaagtggttaaaagttgacccagatttagaactaacaactacaacttttgctctttcttattagttctaaactctaatgttgagccagatttatcacaaaaaataaaaaaataaagttatttgatcttagatgatatttttgctttatgtagttgttttgatgaaattgtttggtcgtttgttatgtgtagttgtaattgattagcccatgacttggctcaccttcaatttgtggacatgggcaacgtgtttgaaatggcgattttcttttgggtattgttgttggtgctcgctctgatctggttataaaattttcctttggtagatttcttgaaaaaaaaaatcaaaatagttgaatgaattggcttttttattttcttaaagtaatatactccatgactttagtcgtcttccactccataaaattgctcataaaaaatgtaagttcagagattggagaataaaagtatgattcaacattgaagacaacaaaacttacaaacattgacaccaagaaacagataatagcaatttaaaagacccaaagttacatgaaactcactattccatatattgggggaaagggatgtcaaattatgataataatgaagaaacgccaaaatgacatcaaccaagatcgacgataacagttgagatttcagacgacaataaggggttgagaaaagggtaaagaaacgaaccaataaagggttgagatttaatcaacccactcaataaccttgctttctacattggcttctaggatttttgtttatgtagtcaactaacaaaataaaaagtttgctagatgaatctctacgcggttaaataatttaaaatcttagtcgtgccttcaatcttttggcttttgcattcatcttatgtcaaatagtctacacctataattgatcatactaaatgaattaacacgcaattaagtagaggtgatcattttggcctggcccggcccgtttttgggcagaatttttcggtccgccaggattttttttggctttgggcgggccaataacgactttttagtctattttttggctcggcccgttttggcccgcaaaagcccgctaatttaggcccgaaatagcgggctttggatacaaaaaaatcggtccgaatttaggcccggcccgaccaatgagcaaattttttttgcagcggcccggcccagcccatgatcacctctacaattaaggctggcaaaagttgacccaacctgagaatcagacccaaaactgacttgaaaatttcagatttgggttgagattttcgacctgaaataaaatttgggtcaacccaacccggcctgaaaatataatgggttaggttcaggttgatcttttgaacctgaaaataacctgatttagaagttgggttatttttaggttggttcagctcgaaattaacccagactttcataatttataaaactatcttttgttaatcttatttgtataagtgcatcttgcgtgtggccggtcactcgcgatattacctgcctgcgcgacaccttgtcagctcgtcagctcattttcaaatggtcatatctcactcgtttctcatcggaatcgagcttttgacaaggcgttggaaggctatcgagccaaattttcatctccaacttgaatcttctcaaaatattaaattctgtgagatatgatcttttgaagttgacccttatgcacaaacccttatgaacaaatggagttactattatgaacagatggagttactcttatgaacaaatggagttactattatgaacagatggagttactcttatgaccaaatagagttgcttgtatgagtatgtggttacttttaacaaagggtgtcactcttataaagaaatgtggttactcttataagtaaaatggaattacctatgtgaacaaatagggttactcatatgagtaaatgagtttatattactaaataaatgggttactccttataaacgaataaggttactcgtattaataagtgggagttacttgtatgaacaattgtggttactgatacgaataaaatagggttactaatgttactcgtattaataagtgggagttacttgtatgaacaattgtggttactgatacgaataaaatagggttactaatgtgaacaaatgaggttactcatttgattaaatggggttactagtatgaataaatgggttactccttatgaacgaataaggttactcgtattaataagtagggttacttgtatgaacaattgtggttactgatgcgagtaaaatgaggttatttatgtgaatgaaatgaggttactcatatgattaaatggagttaattactagtatgaataaatggggttattctttacaaacgaatgaggctactcgtgttaatatatagggggttacttgtgtgaacaattgaggctactcgtataaataaatgtggttaacaaggttcctcataagattaaacaaaataaatttcttaaatttctaattccatcaaagtaggtgatcaaaattcatgtttgaactcatttagagtagattctccttttagcatgttggtgactatttaaatatgtaactctcaatggcaaaccctaatactagaaatttattgtcaaaaatatgagggggtttcgagtggggtttattctcattgacaaatttgaaggactttcatcaaagttctggtctcaaggtgatggtgaaaatggaggagagagaaagtgtggcgtgaggatgtcattgttgttgacaggtttgaagcgtacaaattgttatacggggatgcaggaagaagtgggaagaaagaaaggatgaggttttgaggtattatatccgcgtgggcctcatatatggatcggccacacgcgaaattataggtgtggccagccgtatatgagaatttgtgtatttgtattgggcaaaacccattttttgattattatttaaatttcatttaaggtcattaatccagattttcataacttaacgtgtatagttaaatttcatttcaagtcattttgggttggtttcggggtaatccgaaattgcaagtgtcaggttcgggttatgattttcgacctgaaattaattaggtttgaattaggggtaagtgacctgacatataaaacaggtcaacctgaaaaagatccaacccgaccttattgtcagtcctacatgcaatagtaactcaagcctacacaactgaccactccggcccaagcaaaaaagtcaatagccgattgataatcgttgaacatccaaagtcaccagtaactttcaaatggttaattaagcatacagggtttgtattagtatgcaacagttttcataaacggcaattttaaaataaatgcaacatttgatttctttctatttttggtaaattttttgagtgggaaaataaaaatatacacttacaaaaattaattaagcctgatttatgtacactatattaagttggtcccactttttctctccatattaagttagtcacatgtcattacttttttttaatctcaccttaagaaattttatccaggagaatgtgtcatccaaattgttgcatttaattcggaacggatgaagtatatgattttgaaagtggtatgatataactaaaataaagtatatatgtgaaaatttagaaaagtataaaaatgatacccttcttttcaccaaatacaactgacaaatttaaaaattcataatatacccttaatgttccaaatattcaccgtataccctcattattcgaaaacgttcacgaaatgcccttttcgtaactaccgttaactctttgcattacttacgattttgccacaattaaaccctaaccctaatatctaaccctagccctaatatctaaccctaatctttaatccctaacccacctcctcccctccaccctaggccagtccaacccccatccccacccccacccccacccccttttccaccactgcaacccccaccccttcccctgccaccacagcccccaaccccatcaacctcccttccctttcgattttcgccgttaatcccctccatccccatcccactctctctctcctcgtctttcgatttgcgtgcctccctctctcgtcctcgcgcgcctcaagctttagatctcgtctgagttacataaatttgaggacggaataactcaaaggggggctgcaaaaattcgtcaatttcaggtggttggggactcagattcggctgccaaaactcgtgcttcgtgtgtgctttccggcggttggggactcaattttcggcgattggggactcgtatttgaaggggggactcgaattcaaccgtgaaaactcgtgtgagtggttttgtgccggtggaggggatgggtggggggagggggactggtggagggaagggggtggggtggggtggggtggggtctagtggagggtaaggggaggggtgggttagggtttagatttttgggttagattaagattaatgttagagttagattaggatagattatggttaggggttagggttaataataatgacaaaatggtaaataaagctaacggtgagtcaacggccgttaagaaaagagcatgggtgaacgtatttgaaaatgcaagggtatatggtgaatatttgaatatagagggtatattgtaaatttttcaatttattgggagtatttggtggaaaaccgaaaaagatatttataaacacggtaggaatcaaaaggtgcttcgttcttttgtatttgctatgccacttgtgatgacattataattagtcacctacttcaccaatagtaaaagttaatatacctatgtgtacttaatgctaagagcttgtaggatattttatgagtctagtctgaagactaatgttcaaaaatcttgtttttattgatgtgagagtaatgataaggatatcttgcgaattcataatgtttctgaggttatgagagattacctgccactaaaatatttgggtgttcccacttattctaaagaatctttactacttaatgtaatagcttggtggagaaaatgatagttaaaataagagtgtgttataaggaacatctcttattttggcaaattgtgaatgttgtactcatgagcatacatggttattgggcacaaatcatattgcctaggaaagttattaaagacataaagagtgtgtgcaaagcttatatgtggcatggaaatgtttctcctttaaaggtggagatgtagcctgaaatgtgacctatgtaataataagagtacatgaggattgggggtttagagacgttaagaattgaaacaaagcaagcttgggtaaagatgtgtgggaaataactgtcaagggaccaactcaaccaaaagcctaaactgatggttgaggcccctgaatggatctatactctatcaataacaacaaagaaagatggtatttggatgagacgagtgcatttagtgtacataaaagaggattggtgggattaccatcctactagtgggagtagttggtattgaaaaagaatatgtgaggtgtagaagcaaatgaagcaacactatagtagacaagaaagttaatacatccaaagatatttagtacaagatgttctgaataaaatgacaacggtaagagcactggggattgggattactatctggaacaggcttagtacggcagaatttatactcgtgaattggttggccaggaaaggaagactccacacttttgttaaggtactagttgatgacaatactgcttctacagagtgttagatttgtggaatggaaattgaaacttaggaacatctcatgtttacctgctgctacagtaagtaaattctgatcaagattgaggagtggatggcaattgattcccctgatggaggatttgtatagattggttagatggatttcaaactgcatgaagtctaaatttcaacgagcaacttataatacaacaattgcaggggtggtgtatggagtttggaaagcaataaacgagactaagcagactcatcatattcctagtgtgtaacatatagtcagatggataaaagataatgttagaagaaggatcttcattattttgcccaaaaaggtgtctatgagatatttagattggttttactctttaaattgaatgattgtttttttgataatgtatgcttgtttgtttgcctgactaggttgaaggggtccaacctagttgtgattaggttgtgaatttggttggttttaatatatttcttaattgcttagcaaaaaaaaaaaagaatacttcagcagtagttagacattgtttcatcgcttattcagttgtatatttttttgtattcgtttgagcttgttacttgtataatatttatttatatatctaaagagtttaatatgatatcatcttttagagcaataccatgtcacacgaaaaataaaatatatataatgtcttatgagtgataactcattttccatgaaaaatctatacaaatatattaaaaagcgtgtgtgacaatgtataaacgccatttgacacctctgttactacactagaattgtccaatatatacataagtcatgtcaattaacaaaagtaaaattagcttgcaacaaaatttgaacccatgacctcttgatattatacatgacacagttaccatctcgaccaacttttaatcatactttaagtgtccacattattatatttgtaccttttaaatattgagttttccttaatatattttaataaaaatggaaaaaaatgcatatcaaattggaaaaacattaccaaccggggacaacgcccggacccaaatactagttcatttcctaaaaacaattgttgaaaaagttaatctcataaacattatacttctatttttcatttaagtagaagattaattggtgccacatgcgagttcatactaactaggcactaggagtgttattttcgaataatccaagagacccgacacaaacttctaggccgagaaaatgcgtccccatgaatatcggatattcgagatattgctttggatatccaataacaaaaaaagatgattttttcaaagaaaagctcgaaaaaaaagtttcaggtttgatcggatcaccaaatgttcagatattctattatgaaacagaatatttttgtattttttgatcgagtatccaaaaaattcccaacgcttcaaatatttttggaaacgcgaaaattaaatttccgcgtccaaaaattctcgaatacgctgacatgtatactctaacatcaaaaaataggatcgaatattagacttaccagatcggatcgaccagaccacatagtcaaccgaatcaagtatttacaaacacccctactagtccatagtcatgatgctatacacaaaggcacgttagatcgacatcataacaaaagtgaacaactattccaaagtactcaatatgtttattgaaatttaatcaaagaaaaatcaccattattaatcaagtttaaccaccagattcaaatgttgcatcccaattctactaattcaagatcatccttattttttcttgacctacatttttaaccgcatgaattaaatacataaataatctatgttaattttcactataagtctataacgatcttgtattatatatacttgatgatataattgctgacacattatcaaaattcatttcttattatacttgaattaacgatacttatattcaagtttttacattaataaacgtgcaaaataaaaataagtaaaataaaaatggaagaaattagaaatatgaattactaacatgaaaaccatcccaattcccaattacccaccctatcctacgaaaacaacaacagaaaaggtcagtgaggaaaataggttttacttgtgaggtggacataaagcccatgtaccaatataccgtctcctacttttagagcccaatactaacttagggtttttacgcgttataagttataaccactttacattccatagcagcagtatatttggctcctttagggtttctgaaatcacagcggcggcgatttctctgcagcaacaacaatggttctcaagtgagtctctttctctctcttccttcatgtacgattcttcgtatgaaatttagtttgtttttttctcatcattcatgaataaaaactttgattttatattttcgcgtattgtttttggatttttgtatgacgatgatgaactttggagttgataatgttttttagccgacgattatgtatgatgcaggaagttagggttttttcgcttttgtatattaataattagggttttttcgcttttgtatattaataattagggtttgtcatgttcaatatctttatcattgttagatttttcactttatttttagaagttattgaatgacctaaaagaagttcgtataagaaggtgaattttactttgttgaatgttatgcacattgactgttttagatcttggtggtagaacatgccgttaatctctagaataggttgaaggttaaatgaagggattttgcattccgattgattaggtttttgagtattatagggtgttaaggtggatcttcagctatataatcctgttgttactgtttgaagttgattgggtaagcggtttgagtcgttacccggcagttttgtgcttttagtgaatctccagcactttgattgagggtttccacatttttgagtatagattgggtgtattggctgagcaagattgtttgatctcctataatgtgttatttttgagaatacatagtatctgctcttttactctgcttgtctattgattgtcttcgttcgatagaaatgatttgcttgaagttgattttttgaaaggggcactttgctcctgttctgataggattgatagataagattagagcttattgcaacttggggaattttgggttattgatatttactttggtgctttattctttgcttggcaggactgaactttgccgtttcagtggcgctaagatatatccaggtaggggtatcagatttgttcgtggagattctcaggtaagctttgtctgatcacttttattatttcatatcttggctggctttcttttatagaacatgtcaatctaactagtgatttgatatggcaattgaaggttttcctctttgttaactcaaaatgtaagaggtatttccacaatcgcctgaagccagcaaagctttgctggactgctgtctaccggaagcagcacaagaaggtcagttcataaatttatttttcttttctccatgtgatgtttgaatatgatcaagtgtttgctcgtatctattattaagtagtatagctcctcagtttttgactgtgtttcatttgtaggacatttctgctgaagctgtgaagaaaaggcgaagagccaccaagaagccatactcaaggtctattgttggagtaactttggaagtcattcagaagaagagaagtgaaaagccagaagttagagatgctgccagagaggctgcccttcggttagctttatacttgtgttttgatcttttcatactttattagtactagtttagaagttgatgtgtatgatgctgtcctattttgttagtgaaatcaaggaaaggatcaagaaaacgaaggatgagaagaaggcaaagaaagccgaggtctcagctaaggcacagaagtcgagcaagggtccatcaaagggagcagcacctaaaggccccaagcttggaggtggaggtggaaagcgataaattcatcttacctagtgctaccgttgcatttagttgaggacagtgcaattttgggtttttatatgttgggaagtagacgtttcttattcgctacagatatctatgtatttccaggattattttggttatgcgagatacaaatctttatttttatctaagctgtgtgttatgtacttgggtgctttcgttggtgattttggtgcctgcactattcttctgttacctctcaatccacgcagccctgtacttgggttaaaacctttttgcaactcttgtccactcaaattggatcaatatgttgctctgtcccatccaattcaaaatgactttgatttaaagctgttctggaggaaactatgtacttgtgttaatttgttgattttaaatattttaaccatcataggtcgaatgttattgttctcattctcatatggtgccatgggcatgggcgcatggtggtaaaactgtaaaagtgtctgtactgcccacctgaataccatattcatcagaacaaaattctcatgtttaaaatgtgattcctttttggattctctcttaggactggtacgttttttgaggggttcttatgtctggtacatggtgtttgaagctgcatgatttgtagcaaggattaccatcatattgttctatgtagtgagtccgggcatgtaatatcggccttggtgcgtgctcttctccggatggccacatcctccacgtctgcacgtttgtggcaatgattattgttgataccctattgggtgtttatcagggtgccgactgctgaggactgataaaaacaagcacaaatgtgtgggttcaagataccatggacaacgtatgtctactcccagtacggcagtaccctcttatctagtcaatgatgaaccacagtccataggaccacaacacacaagttatacgtgaatacgtgattcaaaatgaaatgttaatattctgtttctgacctcactctatgcaaaatttgtttagtgtgtaccgtggaatgaaccaaattgctaccttgaatatgtgcattataattaacttgctgaaatccagcacaaaaagatgattccttagggtttaggacacatgaagttcacaattcattacatttttctgcaaagaactcctattttctttacaatgtgaaacgaatctccagaaacaaaccatattacattcatgtaaaccactactataataagtctataacgttgcatttcaggcaaaagactcctatgaagcaacttttgtgcctaaacgactaaactaaaaccacgtaaccgttttgataaatatgttaagccttcttgctgctgcttataagtgctctcggcctagtcttgaacaaaatcttctgcctaacaattccaattacatccaactccatgttcgtcgatgattcggagctcccgctttgatctccatcagaatgtttcactttcttcagcaccaaaagtggcttcttcaatgtgacctttgatcctgttaattcgtggtaccctattgtaaacgtgtatgattcctgtaatagacggaatcaataattatcaacaaatacaagaaactatcaactaaaataaattcataaaacatccatataaaaagggcatccaactcattacacatacgatcacttctgattttggttccattctaatcaaacttacttcttccgtaacaaaatagatattacacttctttaggaaacaatctctctatatctgtcttctattacatgggtccctttttttctttctcttctcctcaaaaaattgcctagaaaagtatatttttaaaggtgtaacatctttgttaaggagaaattatttataatagctagaaacatagccatcgagcgatttcaccttccaaagtgcccaaattatacctatgtaaacttaagttataactaaacatggaaattgacctattatttagagacggagggagtatcatttgagaacgcgccattatatcgaattgatcactagagtataatcaaagaaacaaatcaaaacattatatctaaaatcaaaagaaaatgcaagaatgtgttgaaaagattacctgagaggaaggacggcaaattcgaccgatttcgaggtttcgaagattgttctggacttcctcagattgagcttcaataacaccttgcaactctatgattgcccattctttacaattcttttccccacacctgcatttcacctctattggtcccatttttcctcacttctatttcttcaaagaacaagaacaaaaaaaacaaagcttatattaaaactaagaatcaactctacaataattccagaagaatgagagaaaaattatgttaagtagtatcgatttgttccgattgaaattgatataatcaatttttgtttagaggggaaagtgaagtattacttgaaggagaaaataggagagagagatatgaagagagatcgacgaccacacctgcaatctctaataattggcggcaaaaatttacttttgcgcgcgcttttatgcttggaccttaatcgaaacgatgtcgaattgagaaaggtagattttatgaagtttgagttttgtcctttctttttcaattgcaaccttttgattatcgtttaccaaaaattggcaaaaaataaaaccttttgattatcaggattgtcaacacacgtaaaactgtaaaagaattaatatgccgaaggtatacatcgacactaatctcatacttgtcagtttctttttatataccggatgagtgataacttatttgcagtctattagatggatggacataattgtatcagactaataaattagtatcaattttgacttatcaactcaggtgagtctctctctaggaaggatagggtttcagtgtgagtagacttgggcatgggccaagcccgcgggcttggggaaatggcgggatgggcccaagcccgtgagtggcgggtcgggactgaaattttcagattttgtccatggctcggtccacgcccgtcggctcgtgcctcctacgggttggcccgtgttttatgttgttttttttttggatttttgacagttttaggctaaaaaacaaaggaaaagagtgttcgacccgcgggccatctagacgggtccgtgccgctgcgggtttgaaatgaaatttcttgaacgtgacaggtccgtggtccacgtagcggacaacatgtcgggcccgacttgagcgggctcgtgccggcccggcccgcgtgctagccctacccatgcccacctctaagtgtgagtctcgacagccaacctcgttaatctctcttgggatctggatcagtcttaatggctgatcatttgattgattgtgtctcgagtatgaaaaataacggaagatgaagatttggtggtggaattgggaggaattcaagaggagtcaacaaatgagtcgattaatcttgcgttggtaggaaaagtgattacttgtagatcatttaattttaatttgaagccctaatgaaaacgttgaatcaaatatggacaatctcaaaaggtgcactcttccaccaaattgagaatagacattttgttatccaatttgcatcagtgaaggataaagcaaaagttaaggacggacgaccttggacttctgataataatttagtgatgttagaggaaatcgaaggtagtgtacaaccatcaaatatagccctaaatcgatgcccgtttggcttcgactgtataatttcccattgaatagcatattggagaaatttgtgagggtaattggagacaatattggggttgttcttgaagtggagtctgatggtgtggcatgggacatgtcggctaggtttaaaattttgatcgacgtaacaaaaccacttcgtcgaattcaaaaaatcaaaacgaaggaaggaggggtggtaatggtggagatcaagtatgaaagattgtccgtgtttacgatgattgtgggggtgatagggcatatagagtgcgactgccaagaggaaaaagaggaaggtaataacgttgaaaaacaatggggtacttagttacgtgcttcgccgcataagggtagagttaagatgtcggatgaaatgaaagctttcttgcgatgaaacacctatcctttgggggcacctctaagcagagagggggtgggtcaagcagaggataagtacgtaagtggaggagtagagaagagagtgacccttagttcaatgatggagggatatgttgatgtccagcctcgttcagaagaggccttgattcagttttagactacaaaagaaccaacatcctctctcttaggtgttgtggagagagagagatagaccaaaataatattaggcccgttgcgaaccacgttgagcagcctagtggagaaagtgaagcgaggagtgtgaaagtagtggctgggagtatagtattaggggatatagggaagaaaatgagtactgaaagccttgagggagagggggatggaaagaataagggggaagatggtatgatagtgaagcggaaagagaagctaggggtagtagaggtggtagggcgcaataataattttggtattgaaatgacagattaggggggttagtgtttagaggcgaaagtggaggaaatttccccgagataaaccaagggttttggcacaagagaaggaggagagtggagtgggaaaaaatggcaatggtgacaggaaggaggagggtggtcttgtcgtagtgaagaaacgagttgtggatacggctgagtatgaattggcgagccccacctcctgggccctcgatgaccaatgatgtacatcctttcatggaattataggggcttagggaatgttcctgcaataaatgcgttgaaacgcatagtacaacttggacatccccaaatggtgttcttatctgaaacaaggctaaaggtgggtgagatggacaaataaaacaaaaaataaaaatgaaaaacatggtagcagtggactgtgtgggagaagaaaggaaaaggagaggagggcttgctttgctatggggagacatggtggaggtttgcgtgacgtcttattcaacgaaccatattgatgtgtggcttaattctagttagtatgagaagtgacgattcacaagtgtgtatggacatccggaggaagatcaaaagtataaaaccggcttattgttagcacaacttcaagaagatcaacatgaaccatgactttgtggagggatttcaatttgatgatgatgtctagtgaaaaaaaaaagtggcaaggatttttgggttgaacatgcagaaatcctaagacaagctgtagagaatgcaatttcgaagatttgggttacattgggcatgaatttatacttggaaaaacaatagagggggtgagtataatattcaagaacgactagatagattttttgctactccaatgtggcggcaacaatttccgcaggttcgtttgttactcatttgtccaaacgtaagtcggatcatctttcgatcttgttgtgtttaaaaggcaatgttgaagcgaaaaagaggaggaaaatatgtagattatttcgttttgaagagatggggttgggggatgaaaattatggagacattgttggtagtgcgtggagaggagaaggtgatctttgctcaaaaatttcccacacctcttgaaacatgagtgcttgggggcgcaagaaattcgaatatttatgaaggagatggcagactgtagaaagaggatggagcaactcacgacagaagatcaatttgaggaggttattgctcaaatgaaagcccttgatgacaggatggatgaactcttgtgacttataagaaaaatggataatagttgaatcccctcttgtgaaacatatatataaaaaattaagcaaaatacataatagttatattggttttgacaaattttgtgtcgctaataaagaaaagtttcgttcaaagtcctcattttggacagattttggataactagcttttcaactttcatccttcacaatgcatgtgaagatttcatcaaatgacatgaatcctgtcatattcctctgcttcttttcactcgtcacactttgacttttcacgtttgtcgatgcattattttgactattagtatccttaattgtgtattagatgatataaaaatatgattttatgaaaatataaattgagacgaatccaacaacatattacattataacatattattttatttaatggtaaataatgcatggtcatcggtcactggtgttaaggaaaattgtgatgctaattttaggtggtggcaagttggacatgatgttgtggagtagaacttgcaacatctgagattctgagtagaactgacaacataatcactttagacattttctcctaatagatttagttatgttttattaattgtaatagcttattttattgtctttgatgtagttgaatcagaacataccaaaccaaagggcttgggttcaaggattcttaagcttctattcactcatttacagaacaattaacatcagatacatcccctcaaaaacaaaaaaacatcagatacatctattacagaagtttattgcagttaatacacacctgatatcaggtacatctattagactattacaacatagttactgtctgatatattgtcattattcattaacatgttacaagagaatgaaagaagttacatcctaagttctaactagtgttacttggaaaatttaatgatcaaaggaacgaaaccaaaccaaagatcctattctttcaaatgaaagatcttccttacattttctttcctccacattgtatcatatctatacctaagtgtttgaaagctcgaagtagcaacctcttaaacgcccaaagagctgttgccagtgagagtttttatcgcaaaatcgatgcatggatcatcgaacaaatccacaaaacccgggcattcctggccttcttcctttggcttactctcggtagtgattatcctgctgcactctagtggaaatggctccagatgataaggccgtgtaacgcttctcgactcccaatcttcattctttacaaggaaatcagaaggcatacaagactgcttgtttgagcttataccattgtctttgcatacgttgacagcaaacttaggcttcttgttgctgttattagtccaggtgtctgacagtttttctccaagaagggatccaatggctggagcagaaagatagacagttttagctccatccttttccttgagcattgaatctatgatttctgatagattcggaatgctgattccgctgctgtcttcacctgcaacatcaaagcaaacattagattattcaccacattttgattgttttatgcacaatttgcaagctagaggtggccactggctgggccgggtcaagaagttacatgattgcgatagacactaagcttcataagctatgttatgcaggtactgggtcaatgaaaaatttggctcaaaattaattgggttaaacaggttgggtcaagattggccagtcggaccaggtggtgagctagaagctcgaccgtggaatggtacaggccaggatgttcccaggcctgacctacatgacccgatcccaaactggccctgcggccacctctagcagccaaattttttcttattttaatagcatacgctgatctggatcaagtataaagaaaggagtgcaatctcttttcctcctttgtctagaagtacttctccctccttttgaagatctactgatcgttttcttctctatctcctccgagtctttagctccgcctttttctctctcaggtttgctcttgtcttttttcagtccttgagcagcagattcacataactggtacagaaatgtgaagtctgtaagtgttgactgcaacatctaatagcaccatagcaataagtttttcaagggagaaaattacctttttgcctccattcgatttgatcgatttcttcttttttggtacatcctttctcaacagcaaagaatcaacacaattaatatacttacaatatgagtaacaataaaatctactctaatccaaaacttagaggtactccctaattaacatacatcaatatcgtatattgtggacatcaaagttgctaattagcatacttacagtatgctgaatagaaatcatttccgtgctgtcgctgtctaagcctttcggtttgttcttggttacatgctttcctaactttcctgatagaagatatcgatcgatgtcctttagagaccggaatatatacccatttacaggatcagtgtagtactgaaaatgaaaagatgcttacattagattttgctgatgaactcaggagcccagtaaaaggcaaaatagaatatactagtccatagacctacaaaatgtgcctctaatcttctcaatacgagataggatgattaggatcatgctaaaacagtacttgctaatttacccaaacaaaaatagacatgaaacattgatggctcgtttggtagttggttataaatggtggtaatgagaatgaatttgtatgtaaatttgtgaagaatatcattgtccattcccatggtaatgctaatttatcctaaattatctactttttttctaaaaatttcattcccatccaataccaccttgtaggtggtaatgagtggtaatggaaattgcttccccttggagactaaaacacaagattaggggtgagattgcttgcttatagagaaaaaatgcaatcccgtggagattttgagggtaccttcctaataacattctacttaaatttcattcccattaccgcaatttattaacgtctaacaaacgggcagtgaaagtaacaatttaaatatgctagaatcactaaacctttttctgtattccatttgttccagattggcttacatagcttgtcttttggtgtccaagacacatttttgaccatctatatctctaattatgtatgaataaaagcgaacattgagacaaattcaacaagataactcgaatttctatgcttcgttctaagaagaatgataccagtaatttcttggactaattacacttgaacaacaaagaatcatgagacaaacagatctagatacaaaatgtcagtaaagtaatcctggtctatatgtaagttatgtaactagtttagtggcttaattactattccattacaccacatattcatttactatatatcagttcttctgaaacacattatccatttcaatgctggaataatattaatcatcatctaaactctattgcatgcagctattacttctcactaatcctgtaaaaaaaaactatctttatatcaacaaaaaaaacacccataaaataaatgaagcattaatgcatgtatctaaaataacttaatctaacaacaacaaaaaaatggtcacataattataagcattgaaattaacaagaacttaaaaactggagatttgaaatttgaaatttactctatcttttttgccacttttcctaactctgatctcaattttccatccttctggcagccattcttcactcctaatctgttctcccataatttctttgttttcttcttggataaatttacaataaattcactcactgactcacttaaatctcataaatttctgcccacttttatgcttatttctgtctaaaacttaggaacaccgctaaaaactcaagtttgtttaactcaaaaaattccacttacttactcactcactctctttagttcactcactttgatcaggtgccctgtttgtttttttcctttttatagtattttttttgtttgtttttagtgacagataattgaacagttttatagaacaccaagagagttgatatcacacgtggatggtaccaaactcttagtaccagatcacacagaatatctctcactcactaccccacgaatgttgtgcatatgtgagttgtcccacattgaagaaagtatcacaatataagcgagagaagctactcctattattgccaattaattttagtatggaacctcctttaaatttgtatatatatggatcgaaatctccttctccgtactgaattgtcttagacgacttccagttatagcaaatttatcatactctttctctttttatcaaaattcttttgtcaaagaaaataaagagtttaagttccaaggaaagacaagagcatcgttgctccactatcttttgcaacttctttctctcgtgttcctcgctcgatcaatataatctcatcaactcaggggtgcgccaaagtttgtgtattatgtcttgcttgccaattgtcgtgtttgatttcttcaaccataatgccttccttaaacgtgtcttatgtgacccatttctttttctattagtactttctaatatataaatatatatattttttgacttccttttgggaatctatggtaagatgaataaatatcctttggactgccctcgcacagggccactcccccagaggcctagtacttaaccagagggagttgttcatcttaccacatgcttagatcaactgacaagggagttgttctagcttaaccagaggtttcggcttcgagctctgaaaacgcagccgtgtgtgctagaagagctttcccccattggggcctgacccggctcgaatccggattagtcggatccaataatggatttcgaaaaactgcataggattcacaaaaaaaagtaaataaaaacgagggagtaatatgttcgtcttcttaaacattattagtagccttgtagtcatttgatgaacagaaatgtgatttatcaatacgttgtcttcaatttgcatatatatgcacacattatagcagtaggccatctcaactgtttgcacaagttgcaaatgcgcatatagagatatagtagtttcctaattcagctcaacaacagtaacaggcactacagtctacaattaggatttggaccatagtgttaggtgaataggcgaggattagttcacttgtagctgtcttatcaaaggaaaaaagaaagctattacatgttacatgaaagggtaattaaagaagcttaagttgagatggatattttttagaaaagtgaattttggagtttcttgtatatggtttaactagaggtcgataatactttctctatttctaaataagtgcaaggcttcttgttttcacgtttgccaatgtattattttaaccattaatattttcgattatcaataagtaaaaattataaaaagttgatataaaaaaattcacatttagacgaatctaacaagatcccacatgattatgtcttccctaaaatttaaatcaccaaagctaattaaaatttaattaaactgtgaatagtaaacactatgcaaatactgcacttatttagaaagggaggaagtagttcattgcttttttgaggataggaaaataattttttgtgacaacaattccaaacaaaaaaagcaacataaacacacacaacttactccagctcatttcgatctccttcctagctaaaatgatactgtaggtagtaggctggttgtaccacgtttatattctaaaagaaaacgtgtcaaaaaacatttttcctatttctccaaccttttttctataaggaattcataattgtattttctcttgaaaatattgtttctatagaaattgttttttcatggaaaatttttcttagattagcaaatcgataaagtcggtttaacactagttacgttcaattttattataggttcattttcatattaagccaattttagctctcgtttcaactaatatttaaaattcaatatgtaaattgagttcaagaccctacattttcagacaaatttgatatattgacgataaaaatttgcaatgcaaggctttataatggcacttgtaaaagtgagccatttgttttaaagaaagtaaatgtctaacatattttttttttataatttatttcatttcataaaaaactcaaattagagttatgagcaacatcaaaacaccaagactacacacccctattatcatgacaaagataaccaacatctacatccaaacaattccaaaacgacaaccaccccgaaataacatgagcactagaacaagataaacaacacactcctaccaattccatacacaagcaacaacacccaacattaacaaccaccacaaagctaggaagctcaggacaacataaatgaaacatctaagagctcaaaaaacccataaaatatttttaatgacatgaacaccatactagctagccattaggatatctcttactagttactacaccctctctttactacttggaccccatttctcttctccattatatgatgaaactcaggatgatgaagaatttgagattgatcattcttctccaagttatgatggagtcctaaatggcgaagtaattgacattgatttttcttctttgtccgatgaaaagcaaaggagagcttggcacaacattactcgaatttgattcaaacaacaaaaattgaaccattactaacatcatccgcggaaactacattctaaacatttccattagcacaaagaaaccttatttctatcatcagaatatgattttatattgataaacatctcatttgcagataaaaggatattggcatcgctatctaaaccaacactctccaacaacctctctggaattggagacaccttctcattggtactactaacattaataatatgatcactgctcaacaaagcaatataatcacaagagacattttgctccttaacatatccacccttaccctctaactcaaaactggaaccaatttgcagattttcccacttcagtaaagcacccacttctaacttgaactcactatcatgagagaaagataaagttcctctaccaaacataacaaaagactccaataaacagactctttgagtgactccaacaacaacaacatcaggttgcttcaactcctcttgagcaacttgaagaaagacattgacaaaattcctccaaggattagcaacaatcatgacagggacaaaaattgaatacaaaacaccattaatctcaacacttagcttcaaataccaaccccatctattaaaaccagattgaattttccaccaaagatgaccacgtcgcgtcgtttagagtatttgaattcaatcaactttgaacaaccatttaggatatgggaaaccattcaattaacttgatcggataattagtccacctttttttattcttaaagaactcacaattttttttttttgaaaaaaccattgcttaactccattgaaaaaccttaccttggatttgaattctcatacttaaactccaaattgaccagcttctcaaaaatgtccacggaaataccacatgaaatcccccaacagcaacccaaccactccaaagaagggggattatgatagttacgccttgagaattttgatttaaattctaattggagaaaactatttgagagaggaattttggaaattgaaataagaaagagaaactagcttagggaagggagtgaaaaagatgaaacgaaaagtatcgggaagggatgttgaccatgcgtcaggccgtcagcgcacgcccgaagagagaagtgcggtcgtcaccgtctcaagggaagccgaaaggtttagggttttgacagggagtctaaaaggaggagatgaagctgaagagacacaggttcgttctcttatatggtcctaaatgtctaacatgttagtcactttactactatattgaaatgacggtaacatgtgagagtttaattgacatattagagatggaagaggaggatagttgacatgaactataaatttaacgagttactcaacctattatcaattgattttaacatgaaattctacaaatattgtacgtgatgaaatttcctccatcaagttatccgaatgggaggtctcataagtaggggtgaaagttcggtgtacggtttggattagggcctaatccaatccgatccgaacaaaatttggattttaattttccaatccgaatccaaaccaattagagtttgaatccgatccaatccaatccaatccgaattttcatactctaaattggatccgatccgaaaatccaatttttttaaaactctagtttctcgatgaaataaatcaagcacaacggtagcctagtagatttaggaaatgaggaattaagttttgttaggattctaggggaagagtggaagtgctacgcctactaagctatggactatgcttctttttagaaaaaaaaatagttaagcacttaagcccaatcaagatacataatacaagacatattaatatttggttatattggatttttggatccaattaccctcaatccaatccgatccgaagatccaaattttccaaaaatcttaatccgaatccaatccgaacacatttcaaatccgatccggattagtaattcggattggattagattggattttggattttatccgaataactttcacccctactcataagcttgttaccaattccaaaaagggaagccccatcaatttgaatacttgaagatgaaaaggttttgaatgtctttgtggagcacaattaataaaactatatgatcaacgtacatttatatgcgaactaattaattacacccttgtacaaagaatcttccgggaatacaagaataccacacgtaacccagtcatgcatgtttgtattttatacataagaacgtatgaatattaaagaaaataactagacagcaaatcagccaaaaattgcaacacttaacattgttgctttaacactaaattttcgctacataaagctgcaaataaactgttgttgaagatcgatcattatccaatatccatgagtccatgaccatcaactttcattaaacaaaaagtagcaatcaaggatccgtttgcattggtagggcgtaaaatgttttcagtgtaaaatgattttcatggaaaataatttacaataaaaaacacaattccaaaattagttttccattgcttggttccatgtaagaaaaataatgaaagtgaaagaaatatgaaagggaaagtaaggaggtagtgagaggagtgtataagagcgacaaagaaaacagttttcccttcattttgaagggaaaatggttttctatcattgagagtgtaattttatttcaagggaaaatacttttacactcctttgccaaccaaacaatgtaaaactgaaaatagaggaaaacaattttcaaaaaaaacgttttacgccctatcaaatggagcccaactttcaagttttctcatcgattgtgaagcggatttggacctcctgggattgatctcctacgtgaaactgtatgcaatctgtgctcattgttcatgaaattatcgcggttgcctctcgaaaaatgcagaagcaatactaatatgaatgtaaatgtgatgaaagtgtaaatcgatgaagttttttgttttatcatggaggcaatcaggaagaagctaggaaggagaatgttttggaaattaggaagattagtaaattaatgcatgctttggtgggctgttatataagatttgttgcattacggtgtcaaattagactgaatgaattattattacacgtagtaagttgttaatttaatgaaatactcatgtagaaccatatcataaggtacatgcatgaatgcatgattgatgctttcttggaggataattgattgatctaagtttttcccatcatgcaaatgtttgactttaattcattaaagtactatattttatagacgaattgagtttgcaattttgaatttgtcaacaactactacgtacaagctaaatactaacgagctttcggttcaaactccaatactgcgtaatattccctccggtttttattagtttaccctttttttccacataattttaggagaaataacgttgtggatcataaaaagaaagaaaaactattattttatattaaaagttgaatgtagtatgataaaaagtttagtagtcccattctagaaatggaaacaaaagaaagagataaactaataagggacatcccaaaaaggaatagggataaactaataaagaccggagggagtactagctaaccatcttcattttgatttgaattaggatagatcaacacgaactcacgaattaatgattacttacatttaaattagattataccaaataactcatcatcaaaacttaatttaaattttaattaacataatgaatcatttgtttgccacctcccccagcaagcatatctattttaagaaacttgcagatattaagcttgtgatcattgtcgcccttattattagacataatttgtcgcgcttattaagtaacatgtccttttaaccaaggatgtcttggcctagtggttaagattgaggtgctgtgaacgataggtcacaggttcgaatcccccctcccctactttgtactgccttcgtggctcatatggatcaaaaaaaaaaaagtaacatgtcctttttatgaaaaataagagtttcaaatgaccacaaatacatacttcatatagagtgtaagataagaacaaatagagttttggtttacaatgataaactttggatagtaaatcgattataagttataatatatattttgaaaaattatgatttttgtaacattggaaagtatttgaaaaatacttcaaaacaagccatttataataacttacccaaaaaaagattagtttatgaaagaaatatttactataatattgtattaaagaagcacatgaagtcgcgaaacttggcgtccttattaaatgtcatttgtcgcgtttttaattgagtatcatattattatttttaaaaataaataaagttttaaattactaaaaatacatatatatagtttgaaatgtgaaaaatagagtttctttacatatatattggggaccataagtgtgatgttcaagtatttaataccatataaaaaggaacatgatgaagatgacatctcaagtccaaaacatgaaccggtgttccattttttttccaagtactttttgttaaaaattagagttttttgttagagacaaccttttaaatacaactttttgcgaaagacaaccttttaaaattttttgggcaacttcagaccttaatgaattttttttttgtcaaaaacaaccttgaccagaaatccggcattgactcaccggaatccggcattgactcaccggacatacctttttcatcccaaattcccccatttttctccttttacccccctttaatcatctcaccaccactcacctcacaactctccattttcaattcttccttcctcaatagatcgttggctattaacccttgaatccaccagaattttggtcggggtgcaacgacgaagacaaagagggatggtgcttttcagcactcacttcgaggagagagagattgcagcatttgagagtgcgtgagtgccaacgaaagagaagatatgagttgcgggagagagggaggtcatgcaaggcttgcggaagggtgtcggataggtgggtcagtggctggggaatgacgttagcagtggggcatggtgctgcaggtggttcgcattactttgcaaggtggcaggcggtggtggtgttgtgggcagtagcccaaaacagaggagagagagagaggatccttgaggcttgtttgggctatgtttttccggtggattcaaggtctaattccggcgatttattaaggaaggaagaactgaaaatggagagttgtgagttgagtggtggtgagatgactaaagcggggtaaaaggagggaaatggggggaatttgggatgaacaaggtttgtccggtgagtcaacaccggattccggtgagtcaatgccggatttctggtcaaggttgtatttgacaaaaaaaaatttcattaaggtctgaagttgcccaaaaaattttaaaaggttgtctttcgcaaaaagttgtatttaaaaggttgtctttgacaaaaaactctaaaaattatgtcatgttcaagtccagaaaattccaaacaagtattttgctagtatatcctcgcttaaacactggtattagttggcataatccttattattatctgttctaatgaagtttatactttaagacaaatcatgaagatgtcaaagtacatacgtgtcgttgtctggcagttgttatagaaaacattgtaaatatgggtggttacaagtcttatgtgcttggactttcgtatatgttacttcttattgtatgcaaaaaaacatctaatcaagctttaaactccaattagaactttatataatgaatcaagctaatcaggttacaatttaaatgccacctaaaggacaaaattgtgcattgagattatcttactattagattgagttattttctattgtgtgacacatagagtttgctccctttccattctcaaatcattggaaagtcaattgatggttttgtctagatgtaagaagttaattgtttaagatttttcaaatttaaacttcattttcatctaaagtggcacaaatgtatactagtatatgtttcacaataatctattattattttagagatataattccctttgatgaatattattttgtatactatacattatattccctattacctagtgttttctaatatcgactatggactattatggtgctttataatcataaatttactagtgaactaaatgttaaatatgggtctaggccgcacccatcacaaggagagagagtccacttcacaacacaaaaaggaggttccaccttaaatcatatggcaataagaggagtaacccgtttgtattataaagtgaacccatctctcttatttaatcaatgtgggacactcacatgtggtgtgcgctatacatcatagcttctgatagagtatagatatattttgtgcccttttggttgagttggtcctttgacatggtatcaagagccagtgtgacaaaaaggtcacgggtttgaatctcgtccacccctccttctcagtggaatatttagcgccaggtatgagggagacttgtgctgcatccacacttcaagcccaaagggcacttgtgtgagggggagtgatagagtatagatatattcctggggcctcaaccatcagcttaagcttttggttgatttggtcctttgacactaaatcagtctatttaaattgaaagcttgaggttatgcgaccaatacatgcttagatcaacaggtaacggagttcttctagcttaaccagaagtctcgagttcgagctctgggaacgcagcagtgtgtgttgggagagctttccccccaattggggcctgacccggctcatttccgattagtcggatccaaaatggatttcgaaaattggataacgtctccttaaaaaaaaggttgaggttatgcgagcaatgatcaaacacttaaaaattatagtctgttttagtctttgatagatgctgatagaggtggtcattggacggaccgaacggaacccaaccctgaaccgaccttcaggttaaccggagaggatcaaactggaccgttagatgactgggcctctgaaccagaccggaacttaacaaacataagggttctcgtggcccaattgatggcagaagaaatcagcctgactccatccccaaatcgaacactcagcgcaaaacgcaccgtaaatcatactcaaccttaaatcgaaccgttaaaccggttctaaatatgcataaaagttcttcaactcggccttcttatcaataacactagcgtatatggaaggtatcgaaaattacttattgtaaatactagtgcatgtgcaattaaaattttgaactcaaaattcttttccatttacgaaaaaatgttgaactagtggaccaaatatgaaccggaccgagccctgaaccggttcaggtttgagaaaatccaaccctgaaaggaattttaggcgcaaacaatcaataaaagaagaaaaaaaagtgctaggcactgcgttttgccttatgtgcgcaagatcgaaactcaaaggaattgacagggcctgcacaagcggtggaaacctgaactggaccagaccggtcagctaattggtccgaattcggcccaacccaacctgtgtccatctctagatgctgatagtaccatatatataaacaactttattaaggtagtattagaattatcattggaattgataaagaatatatgtgaataaacctacaaggagaaaagttaatatattctctattaggaacaatttctagtactaaagaataccaaattttggttctttattgtatacataggtgctactacaagatttttggtattatgaatctttcatatgtgttgagccactatggttttgatgatgacaaactaaagtaataactaacaaggtttataagtttcatgtgtgcaaggttcagtgattaataatagtgctttctaaagataataagtgaagttcctgagttggaactccaagagaagaacgaagttcctaagtgatgattcatgattatagttcttgtaacagttcctcaagggacagttcctcaagggacagttcctcaagggaccagttcctcaagggaccagttcctcaagggaccatttcctcaagggaccagttcctcaagggacagttccttgaggaactgtctgctgttcctcaaggaactatctgctgttccgttccagatgcatttggtttcacagttcctcaagaactacctgctgctcagttcctcaggaactacctgctcaattcctctggaactcattcgtgttttagagttacttcaaggaatgggacgtattaatcttcagagatgaagatttaaagggatgacatgaagtctaagttcaagagtatgtacttaggatttatgtaagtaatttacgttgctttatactaaggaactacatggaatttaattaatgcaacaatggttttaaaaagtatttaacagagagtttctaggaaatattgttaataaataaaatagtttttatttttaataaagatcctttctttattactgaataaataaaaatggatttcctaaatacattccttatttctctcaactgtttaaaaccacgtatggttagtggattgtccattactttgcttgttcctcaagaagtgtgaacgtgggaaaatgattctacgtgggttactgcttcacacttagtggaagaacaagtggaacggcatgagaagacttcactataaaaagagaagtctcgcttcattacaatccaccaaccgaaaacatatctctattgctatatcttaagtgttttacgaaaaggtctgtttgcactattaagtgagttcctaagttccttaagtatttgagttcaacgtaattactagtgttttcacacaatttgagttgtattttggggaacaagggttgagtgactcttgtaacgacttagagttaaatcggtgagtagaggcttcaaagtagaagcaagagagaggagagttccatgaatcgaggggattatcgtgggaacttgagttcgagaggaactcgagttttagagtgttattgtaatagagtgattgcaataataaagtttttgaggttttcacttcttgatagtgtcaagaagtttcctcacttttatatttctctgcctctcatatcactgttcctttataattttatagttccgcaagaaactttgccaaaagttactaagtacaattcaccccccttcttgtacgtgttccatttaaatatcaattggtatcagagccggagctcaggaaatacaggcaaccctgttgagtaaagttcctgaagaagatggatacgcacgagaaactcgtagaaggttactccacgcaaaggcctccaatgttcaacggaaaattctatacgtattggaaaaatcgtatggaaattttcatcaaggcagagaactaccaagtctcggagggttatcgaagttggtgacttcgaggtaacaacgactaatgctgaaaacgaggtagttcctaaaccaatgactgaattttcaaaagaagattttgaaaaatatgaaatcaatgccatggctgtcaaaatacttgcaggtgtggtcttggacctcatgaacataatagggtcatgaggtgtaagagcgcaaagcaaatttgggatctccttcaagtcacccatgaaggaactaatgaggttaagcgttccaaaattgatcttttaatgtcaaaatatgaacgttttgaaatgcaaccaaaagaaacaattcaagatatgtttacacgatttactaacatcactaatgaattagtttctcttggaagaattattcccactgatgaacaggttaggaaaatcctaaggagcttgtctcaagatgatcgttggagaacaaaggtcactgctttgttcgaaactaaggactttaccaagttcaatattgaacaactggcaggatctttgattacccacgaattgcatctaggaatggttgtccctgagagttccaggaaccaaggattagctcttaaggcagaggaacttgacgagtcggaacctgatgaagaagaagctgtcatgcttgtcagaaagatgaaaaagttgtacaggaactacaagcctggaaaccgtgaaggaaggaactcgagtagaaaaccagctagttccaaaactaaaaatggttgttttaaatgcggagaaactgatcatcacataagagactgtcctccttgggaaaacaagaaaggaaaaggcaaaggcaaggaactatctaaagatagatacaacaagtcgacttttgccaaacctaacttcaagaaagccatgatagacgcgtgggaagaaatagattctcaagacgaagaggaacaacccgatgaagagactgtaaaacctctgtctctttgcaaaattaaatgaaactgatacagttccatttaatgaggtaaattccactactcttcaatctttttccaaaaccaaattaattgaattatcgttgagaacactagatgattatagaggacttgaaatattaaaaagccaaagtgataaggtgataaactttgggacaaagaaattgctcgattatgtctaatgtctaaatttgacttcaagtctaaaactgagttatttattaataagtctaatgtgtgttcaagaaaggaactcatgaaaatgtgggttcctaattctaataattagacgttatgatcgccttagtgagggggaacaatatatggcacccgttgttctttgcgtttatctagtgaagtatttaaatttctctcactaaaaaggcatataaattgtagagatgtttatgttaagtgagttatgatgtcttgtttttctctaaatggcaaattcatctagcgtgtataatgtagagtttttgtgatatgtcttccttataaatgtgtgtcaccacaattgtttctatgttttatgcatagtcatgagttaaatttaaaagatgactcactgatttttttgtaatattacccttacttgtccatattgctaattgttagtcaaaaggaagaggaagtaaaaagtgtagtttctttcattcaaggaactcatttgttatacattccacccacaccaagtgcattacatatgaatgtccaattatgtgtctaaacgagcaatattattctctaaaatatcaaacctcctataccatcatttatttttaaagatctcaaaaattactccaaacctttcatatcaaatttacatacctatttcttctattcagttcaccatatatccaaattcttcaatttgtgttcctccactataactttaaatattgttgatgatgcaacatttgagggggaattaaggaaagaaaaacaaaatttgaggaagaacaagttgatatggagatgaaaaaggagagattgagggagacaaagaagaaataaaaatatgagagcaaacaggagaataaaaggagagatgtgtgagagggagatagagaagagattcatcgttccataagttattcaagttcctacttctacaaagctgtcataaaatctatgggttctagtagtcccatgcatgtatgttcctttagtatcaaatttaaagtcgagaaaaggaattaattaattccttgaaacttaaatcaaggaacagacagcagaatctattcaaaatatataaaaaaagaagaagaagtaaggaactgcatgttattcgaaaggaactgaggtgtgttttcaaaggcagatcacaaagtaaactgaaagtttaggaaaggtaatggtggaggaacaagtgaccaattcatatattttttagcttatttctaccattccttcataaacatgagcctttgatcttctctatgaattttattggacattctttttattttctatcctatggattgcacttcggtaaaatgatggtttatgtttagcatgctttagcttctttaactaatcgattaacatgtgcatgaggatggctaatattactagattgatgtttgagcaaattgaaaaatttaaactcatggttgaccattaattatatatttatggtggtgtagtgtcactataagtttggaagattgatcactaatcttagaccttttaaaagtaggaagttctacactattcctttcaatagtgttatgagtgacaaaagcttgaaattcactattcatttcacttggacaatctcagccttccatttctcatcccatcttaaccgcacaaatctttttctttccctcctcttcactgcctctgtctctctcatctaatcttctaattctaattctaagctcggaaaagttagggtttttggatatggttgagcacgcaaaaaggttggtttcatcgatttttcaggtatcgcccttgttcatcaatttcgatcgtcctaattctctgggttttttcaatgttttcaggggtgtatcgtcgagcgattgacgtcccacgatctaaaggtttgtttagcactacttcaaaattaactcaaaatctattcgaatttttgggattgaattgaacctagattcgccactgcaaatcaatattattttttaataatttattttgttcttgaatcgaattttagggtttcaatcattagccttgaatacaacaattatcgaagaacttgaaggagttgcgttcttctctgccaaacttttccggcaagtggtgaagcttggtacttactttatcatgaaatctctgattctcaatgagtttcccaattatttgtgattttgttttccattatttgcattttttttttttgcgatttctgattcccttcatcaaatcaactttcctcaattttgtagaacaaattcgtgaaaagaattgcggggaaattaacttttttcgacatcggaaacttcaatcttccaggaatttgaaggttcgtttcatagtaatttcaatacaagttttgagattgaaagcttgaatcttttacatatttgagcaagaattcagatttttttttttttttttttgctgaaatctttactttgataagctgaagaataaaattcagattttcaagagattgttctggtttgcttcaatttttagtgttatgattattgcattcactttttgattttcaaaatgtttgtgatttcttggtaatgtttttgaaaacatgggtatcatgtgataatgaagagcatgaaaggttgtgaattctgctaatgttttatttttcagttatgtgtttttcatttagttgtaaatcatttagttgtcaaattttgtacataaggtttatgtaattgattaaaatagtacgtatcttttgggtttaaatgaaaatacaaatttgtttacttgaacaatttgctaattccatttgctatttccccattttactagagaagccgtatttaatcttccttctccaaaaacatccttacgttgcctgcagactgcaaagcgacagcaggacacccgacttatcttacaaccgatctgggcaaaacattggtgggattgatggagtatagcagatgctaatcttctcatagagtcccacacatcttcattcgattggacaaaaacaaggaagaagggagaggaagcgagactcaatggggccaggctttggcggttccgcgatggactccaatggtcccaagacagcagcaacaaaagattttgtcttttttttttgggtgtttagagaagtcataagggtaagatgaaaatcgatcccaggctctccttgaactgggagagaagctctaatcagttccgtcactctcattttgtcttttattttggtttttgttttgtgatgctccgttttattttatgggttggggaaatacatgccctaacattgctttgtttacacggggtcatgacttttataggacttccatagtcattgaattttgaagcattatatgtttagcatgcacatgtgttctccggttactaagtgaaatgtctttaattcactttctcagatttcctttggtctcttgggacatggaagtggagttacactacttgtgtgagtagattgttgcccatgttgatttaatttccgtccaaggtgaatgttgcataacttacataataatgtgttttcttcgtgcaggtattgttttggtgcttactttaatatcctccctggatcagaatggtcggccttaatgttgaattgtggttttccctttgctgttattggaatggctcttcaggtgaaaatagtgtatagcttccacatttgaattgataagtgcagtagtttggacttctgtatcaagatatgttgataaacatgtcaaaaatttagtgtctagcttccacatttaaattagatatgtgcaataatttggactttcgtatcaagatatgttgattaatatgtcaagagagtagaggttgttgtagaatctagcacggttttgtagcatgttagcatgagtagtgttgcaagttttacacctcctccgttcttactctgaataattgacactattcatcaactaactttgactttattaatagctattgtataaagtatatagaaacacatagtcaagtgtgatcttgctagattcgtcttagtttatacttttaaaatgtcatgttggatttatgttgtcctgctatgatgttgagcttagctctatcatccccaaactgatactttccgggcaaggtaagaagcacattgaaaactttattgtggatcattagttatacattttaagttatatacttctatatctctgaagaaccttcattatattatgaacatgaaaaaaaatgagaacaccatgcatttgaatatttgattcatgaaattatctaaaatattaaagttgtattcatggttgcaggtatcctccccatggaagaagggcagtggcaattgaaagtggtattcaagggaaaagactaagggcagccccagtagatactcccccacctggagatcacatagaaatcctgtggagaaggaataaagaatttccttatggtatgtaccacaatctaagtacttggtgatgttattactgtagctgcttgaatatttgttaaatttgtgcagctggatactagatagaggttaaatattttagatcttttttcttgatttgtgcaacttgtccatgatagcttgcttgcagagtctttccttggtgtgaaagggtagtatatcaggtagagtttaagagcattgcagagtagtttagtatatttgaagaatggaaggtgtgttactattcattattcaagcacatcctttacttttttgtacgtttggtaagcctagaacctacaacattctcaattcgagtaaaccttctttcaaactaaaatttatcaaaaaagtgaaaaccttctttcaaactagatcgtcatggtaaaaagaaggttttcactcttttctaaagaaggttaatttttattttgaattcttgattcagttgtgcgatgcggatttgggggattaatgattgtttttccttcaaaggtgattgtttctcttactctatgtaaatgaagttgagtttttgctcttcttagagtgtttgactttgcatttttctaacgatcttaaaaattgaattgaattgatagattaattcatgcaaatgggtttctcttactttttgcaaatggagttgatgaatttcacatctcttcacttttgatgaatggtgctcagggtcttagataagactagcttaattaggtgaaacatgtattcatgatgattatggtttcttagaccttttaaaagttggaatttctacactattcctttaaatagtgttatgagtgataaaagcatgaaattcactatttatttcacttggacaatctcagccctccatttctcacctcatctcaaccgcacattcttttcgtctccctcctcttcactgcaacctctcctctctgtctcactctctcacacaattcttttgttttcacaaatcagtagagtagttggggaggtctacatgaaaatagagaaaaagtaaagtagaagggtgaagatgggagagatatctgtgaatgatgccaactagacgttggcaaaactatgatatactgaaaagggttatacataaattcttgttggttagttcacatttcacagtatattttgtagtctagcgaacctgagtagcatcaccaagtattttcctcaattattccaaacactttatgttcttagactacagcttggatgattgctgtcacttagatttctgctgttttacctgaggattgcaggaataatgctttagttactgatacctgtgatggtcaagttggtattagttggttccatgttcctttttttgtgattattattatgctgtatatgcccacaagcttatgctgatatcagctctataactcaagcacttgcatcgaggccttgcattgaggctctaatggggcctgggaaatattatgatttctatcttgtacaagattgtttcagatcctgatgttgtgttcttgagaagaggcaaaaagcgacgtcatttatgtgctgttttttttttttttttgaatgacttagggaatgaaaatatgatatacctttcctctgggacagaagtcagatgctttgacgttcaaatggtattaattatgtgaagcctttgtgcattgaacttttctcgaattttttctttctacttcaattttgcacaattgatatatctgaggccttgatcttttaggcttctttggagaagccctttgagtgttacaaatacaacaaagagaaaaaaaaccaggtaagacattagtatattcacaagaaatctttcaactcccatgtatcttaattttgaagatttttaaataatataactactcagcttttgattgagaatgatttttgtcgctgaagaagttagcttgcttagctcctacaagctctttagaattcatcaagaagctcgagttgaacaatggagggcctaaggtagaataccaacttcctaatttttccttcccaaggtggctctgtactagagcactccctgcatcgttttctgtgaaaaaacagtttcattccccgtattgggtactgaatttgaggatgtttttgagatctggtatctgaaacttgctattagcttgagagacattcaaaagcataaagctcgaatgaatggtttaaaagactcagattcaaaatcactcaggatgtttttttggtgttgattagtcaagactttcatccttgttgataatgtgaatagcctgttttgtgaattgtgatggccctgatgaattatgtcaatattttttcctatatgtgctcctgctttctaaactttatcacctgttctatcttatatacaacattatgttggaatggtgttgtagcttctattcagaattttcacacgttatgaacttggtttatatgggtgtatatagtaacagcaaaatcaatcatgtcaagccatagaccacaagatcaatttggtttgtgttattagctctgtccttgccttgtatttagttactctatcttgaacatgttgatatcagtttgaatcaaattctgggtttcatgtcttttggttgctttcacaattcacatttgctttttttgtttctaatgatgcaaaaataattatggcagttgaaaaaggtgggacttgtgaaccatcaactagagagaactgttatgttgaggagctgaacatttttgtagaagagctgaatgtttctactgaatacactttatgattgcaaaggaatgtggagcaaaataattcttagaaagggacaagggacaaagcacggaggcccaataaatttttcagaggaagattcatggaccttgattgatttatgaaattgtaagtgacaacccaaacctaatttaaataaacggtttaaccatgtagtcctgaatagttgaaatgcaattatgattttactaatccatgacctttaaaatgtggaaaattttgccactattcaaatcaatagtattatgagtcttaaaagagtgaaattcactattcataatccaccactctttcactttttgagatttttccttgagtagtgggagtgagccagacactcaaaagatgtggacgttgtgcttcgtgattgtcattactatacaatctctttctctcgcttatttcttcttcttcttcacattttcattttattgttcttatgttacaaactctttttcttgtccaatttgcttgtttttttgagcaatctgaaccagtttattacacctcttccccccatcaggttcacttgcataaagaggaagaataaagcccatgttagctaagtcattatcagagtttgttgcaaaaagaatattcagaaaaaggggatctaacaagcagataagcaagtagttacagaaaagtagtatatataagagggaaatgtaataggcattcaaaatatatttgagtaaatctaagcattaggcagttggttacagattacatggattgatttgcttgtgatttccaaaagcatggagctttgtcttcattcgtgcttattcctatgcgcgaatttgtcactgtttttataactgaaatttgagtgatttaaaagcttgttttgagattttttttgttctcggtttttgatgtgtatatgacttttttttgcaggtttattctgaagtgatgtctaattgtcttttatattattgtatttgtcgctgctactaaggtacggtctttattggctctaagattttgttttccacagtaatgcttttctcaattatatttctttctctatttgattgtcttagcaaaagatatgctattagggactattagattaataaaatgattcttgggattagccaatgttaatagttagagattaggagtagctcttgtggttttgtgaatgaatcaatgtttattgcataaaagaatctataaactgcaatatggctcagtttagatttaatccgacttttatagtgcaaactgcaagactaaacagtaatttcctccacacatattatgatcagttgttgttattgagaattgtctgatttatgtgtggcattggggtgtttcgacaatgtgagagaaattgtctttagtgaaagacctgatcatattgtataagattatagactatcgaagggttttatttacttcgtatgcctacgatgcaagtgcttagaatagattaactgagattcataagaattgatcattgtagctgaaacaaaatgttaaatgatgctttgtgggtttgaaaatgattagctgactttgataagaggcaatagtagctattgtgaagtaattgccaaaacaaagcttgatatattctattgccatgagcttaaagagaaggctacctcccccggtcattgttttctaaacgattgcgaagtattaaaagagaaatattatcatatgtagtcgtgtttgatttatttaaatatatcccatctatttcttttcaagccctacaaggtagctcatcatcattctaaccatttgagaaatggcttcttgtagcttggagactgcccacaatagctattgaccaaggaagaatgcaggagcattaattttgccatcacccatctcgccagccgctaaattgccaacgcttgtcttttttcgagaactacatcagtaaatgtgtagcttctgaattaatatgcaagtttgtatagaattagtagatgtatgtgcatttttttcaagcttagccaacaggaggacctaatgtaggtagaagaacagttgaaaaacatgtctagaattcaaaatgtttatggaaatgcttcattttcaaactcatcctcaatactttctatgtttgccttctttgtcctaaaatttattaacgtcttggccacgttcaagacaaaagtcattaggtttacaatataaaagtaattagactttattatgtattatattgtattcttacgtaaaattgacaattcttacaaaggtgttaggacatccatagtgcacaatttctagcacacccgtggcacaaaacatatattcacaccttgtttcatattgtgaaaaaatggacattaggctaccttcatctaaccgactacagatattacatacaattgtaatattttgccgatcgttgaaatcttactattcatttagtctatgagtgggggaggggaggggagagaaggagatggtagaaagaagagtggttgagagtgatggagaagataaaagatgttagaggttgaacaagaaaggaggaggtcagaataacaaaaggagaaataaagagtcaagtgcacataggagatttttgaccttatatcttaataactaaacacaatttattagaaaaactacaataattattaaattggaaaagaccccatcacaatcaccttgccgccgccaccaccaccaccacgccaccattctgctaaaaccatcatcagaaccaccaccacaacctccccgctaccaccctcttccatttctttcaaatccttctaccaaaattcacgaaaattcaccaaaatccttaaccaaaaccctcttccatgttttgaataatcttgcatctttgtaacatgtcattgaagcattgataaaaaaaaggaagagcttatttcttcaatgttcgtaacatgtcattgaagaacagattaactctcctttgattctaagcttttgtttttcaccgtcatgcttatcccaattccatttcttctctatttggttgtcttcaagacctatataaactatcatgttatttgttcatcttcactagcaaaaggtatgctactagggagtattagattaataaaatgattcttgggacgtaaggcaatatcaatagttagatattaggaacaattcttgaattaattctgcatgaggttggttaagggctagaccttgattaattctagatcggtttaattaagtaattagtccatgattaaaaaaaacaggacaaaaatatttgaggtgttctattttacttgtatatcttctaaaggtgattgtgattcaaatgggatcaagttaatctactattgctagatttaaagttgttttgttgtttatactcgcatcataagcttaaaaggctagggattctagctaatgttgatttcttcttctaaaaatctctaattcgaactcaaacatatttgtgtgttgatgctttcatctcaaacaatctgaaattacacaggatttgggagaatcaatcataagatcgcaagaggaatcctttaaaaggatgatgttgagatcgtcattgtcaaggatcctctcatcaccacaaattacatgatatttcttgattgaagtattcatttgaaggagggcgaagaatggagaggattagaggaacaatacaatgttgaatgttttgagtaatcttaatgtagagttggacacgtctaattttttttttcttttgtagattttgtgaaaatatcatcgatgtggttagacgtgaaaggttttgcttttttaatattgtttttggtaatcttaagcttcaaatgggcaatttttcctttaaagtacatgttgagtataatgctttctttgttagaaagcaacacctgcttaagttttcacaatgaaccgaaatagtttaggtgaatttgacctattttaaaagttggaatatctttaaatttcaaattatctttgttcttagtttgggtcttatgcgaattactttttgctacttctctcattcatgactatgtgaattaaaaggtggaatatctttagatttcaagtatttgagtccttgtggatttgcactctctactcaggaatttaccaccatctttcatgaattgaaggcgacgactttttttatccgagtcacaccaaacacatcattttccagaacagggtgctacgctgggacattataaacatcttactttaataagccaaggctccatatgacaaaggcttcaaagacatgttggaagcctccacgttaaccagttcaacattttattgctatcgaaaattgctagatatgacgttcaaattgtagtttaaacaaccaatatcgtgcatttatttttcaacgttatatggacgtgtaaccagttttattacaagcacataccctccatggtttgcctaatgcaattcaaacaaatcatgtgcttaccacctatttgaaaccaattgcaaaaaaatgttatcgtattaactacacctgacaaattatgaataccgaaattacactattttggggtgccgcacgcgtagagtattgaaatctgaaatgcatatgacaaattatgagtaccacaattatactatgcagtgacaaaatgcacctgacaaattttaaaattaagtattgaacattactatatttttcaattatctaaattcttgctaaacatgaacgccttgtgattagagtgatacttccgttttttaatttcccttgacgacacaaacgctatttgatacgagtcttgatgggcatgttgtatcttaggtgcgatgaagtcgtactatataaatactttctattttgttatatctatagggtcatgcaatggaagcttatatcgtttttgtgagagtaggttgaggctccatttcaaaagcactttagagacatgtgaattaattatgattaagcaataagtgccagtttagagaactctctataattgttaaattcaatctttaaattgcacttcaaacaaccatcatttaattgtggatttacaccttacttttttgctttaccccatgcactcaaaacagcaagtacccatggatttggaataattactttacaatcatcttgctaattgaaacaaacgtaattcgaatatcacaagtacgttattttagagtgtcgcacacgtaggcacgcggttaaaacatcatgcacacatccttgtttctatgtacaactacccactgttagcatcaacttttataaacagggtgctgcaatggagtatactctatatcttgcgggaataaattatagattcactttaaaaacacttcaaagggacgcgcaaaagctccaggttaccaacaagttttgaaccaaagttgttaacttaactattagaattgcacttgaaataaacttatttatgtattttcttttgcaaatgaaaattatcagaaaaaaaccgtgtttgcacatcgatattaattgatttgcttaatgcacttaatacaccttctgtatgtaccatcttttgggaatacgcgctaaagaaattttttactactcaataatagcaaactacaaatatcacaatcatactattttgtaagagaatttgtaaaaattcaaaaataaaagacgagagagaaggaaggaaagggaaaggaaaagagagacagataatgttgtatttgatgttataaacaaaaacataacaaccaagaaagagggtaggacaaagagagaggagcactttcaaagatcttatatagtcgcaaaaagacatatcagaagaaggataccccacacacacacacatcgctaacaatatctaatatagtataaagcatcaaatttcttttctttttatttttagagaaaaagcatcaaatatcttagcatataacttgacattcaatatactcattatatttaacttaattcgaatatcacaaatacaacattcttcgatcgttgctgcctatgaacgatatgaagtgcttttcaaaatgccagccgagcatgttagtgatttatcgactaatgtaagcatttttgcacttatttttcttactttgcacacatactcatacttgatttaaatgtacattgatataattcctttactatttgcatcctcttgctagccctttaccaaaatcttttgtgaactaatgacaacaaggtacttgattcaaatcaaagcaactgcatcaattttcagaaatagggtgttgcgatggggaacaaactatctacaggaatagattatagctccatttcaaaaacacttcaaaggcacgcaagaaacctacaagttaacaatttctaaaccaaagttgttaccttaactattggaattgcacttcaaataaacttaattatgtattcttttttcaaatgaaattaacgagtaaataaatcgtgtttgcacaccgtacttcattggtttgcctgatgcaactaatacaacgtgtgtactcagcgtctgttcggaatacgtgctaaatagatatttcaccacttaaggctaacggactacaaatatcacaattatactattttggggcgccgtgcgcgtaggcgcgcggagcaacaactagttcttgaaaagtaatacgctttttgatgatgtcaaaagggggaagataatggcaaagtaacttatttattatggttcattctctacttaaaatgatcttgcattgttatattacattttatttgtgttagtttttatattactttaccttggtttgtcatcaccaaaaagggggaaattgttgagccactatggttttgatgatgacaaactaaagtaataactaacaaggtttataagtttcatgtgtgcaaggttcagtgattaataatagtgctttctaaagataataagtgaagttcccgagttggaactccaagagaagaacgaagttcctaagtgatgattcatgattatagttcttgtaacagttcctcaagggacagttcctcaagggacagttcctcaagggaccagttcctcaagggaccagttcctcaagggaccagttcctcaagggacagttcctcaagggaccatttcctcaagggaccagttcctcaagggacagttcctcaagggacagttccttgaggaactgtctgctgttcctcaaggaactatctgctgcattagttccctgagatgcatttggtttcacagttcctcaagaactactcgctgctcggttcctcgggaactacactcgctcaattcctctggaactcattcgtgttttagagttccttcaaggaatgggacgtattaatcttcgagttgaagatttaaagggatgacatgaagtctaagttcaagagtatgtacttaggatttatgtaagtaatttacgttgctttatactaaggaactacatggaatttaattaatgcaacaatggttttaaaaagtatttaacagagagtttctaggaaatattgttaataaataaaatagtttttatttttaataaagatcctttctttattattgaataaataaaaatggatttcctaaataaattccttatttctctcaactgtttaaaaccacgtatggttagtggattgtccattactttgcttgttcctcaagaagtgtgaacgtgggaaaatgattctacgtgggttactggttcacacttagtggaagaacaagtggaatcggcatgagaagacttcactataaaaagagaagtctgcttcattacaatccaccaaccgaaaacatatctctattgctatatcttaagtgtttttcgaaaaggtcatttgcactattaagtgagttcctaagttccttaagtatttgagttcaacgtaattactagtgttttcacacaatttgagttgtattttggggaacaagggttgagtgactcttgtaacgacttagagttaagtcagtgagtagaggcttcaaagtagaagcaagagagaggagagttccagtaatcagaggggattactgtgggaacttgagttcgagaggaactcgagttttagagtgttattgtaatagagtgattgcaataataaagtttttgaggttttcacttcttgatagtgtcaagaagtttcctcacttttatatttctctgcctctcatatcactgttcctttataattttatagttccgcaagaaactttgccaaaagttactaagtacaattcaccccccttcttgtacgtgttccatttaaatatcaatatgtattatgaatcttgtaatagtactataagatctttcaattggtactctttaactattggtgattaggccttcctcaagatgatctatcctagccatcagtagttcattacaactctttgttcaatcctatggctaaaatactttgctctcatatctgattcactcatactttaaccattatattggttcagagatctctacagtaaacaactctcaggtcaataattgaagttgtataaagatgcatagaacgaactgtctcatatacagaacaaaaactgataaaaatagataacatatgtcagaatgtgaacatatattaaacaacccagaaagagcaaaaacattgacttgtatttgtatactctatcaacatacatactgtaacatcaagacaaaaactggtaaattttctataaaaacttagcaaattgatgaaaacccaatcaattatgaagtgggttaggcccagttggagtagaattatgtgtgacagcatgaagtgtttttacctcagtttcatttacttcctttgagctaccaaactttacatagttttgagtctgatcagacgattgaagcagaaattttcttgcagatcttctttcgatttgataggaagttcgctgatcgaaaaagagcgaaaacaagatcaatgaactgccaagaatcactaaaacaacccaaagttttgtactacaagaacaactttgagttgacatgttgaagtaccaaaaactttggttaaaaacacagaaatttggcttataactttataagtattatgtttattctctatgttagaattttggtaggagattaataaaccaaaacatcaatggtaaatactataggtctaaaggtatgtcatttagtgtaagaaagagacagccgcaggtctcattctcataattcatatgcatatggtcccatgtattgattgaagagtctgacaaattgtcaaagatgataaattgggttgattaagtgattatccataaaacaattagaaaaggatttgagtttaagcttggaattattagagacttagagttttaagctattgggatttctgggaatcaatgggtgatgaagttgtcaaattgctgatttttgatttgaaaattcaaagtttacagatagaattttttgttagaagggagcttttaaaacatttaggttgtgaggagagagcccaaaataataattgtcaaccactacctaataagtaataatatcatatacttcctccgttccacaaataatacaacacgtgagttttcaaagtcttcgatgcacaacttgaaccataaatattaaaatatatttaattatgtattaacaaaaaaatacacattgacatgaattcaacaagattccacatgactatgatattataaatatagtggtggaaagtcgtggtaaaaaaattaatgacatattttaaaaaaaagtaagaagaaattatcttaaatgcccttgtacgcgcatatatccagaggctcgttacaagttagacaccccgcaacccccttcttctcttaaatcccgagtaaatacttaggtaggatttaaactctagactttattagagaagatggaaaagtttagcacttgagccaattccaatttttagggcgaagacattgtttgatagcaatttgctattcaacccaattgcaaatccttcaagattgagtaacctaagtaccactaaaaaactaagacaacactagaaaacatttttgcagagattagaggggctgtgcgtgagaaatcatgcaggtcttgttatctttcatagtgcctatcttcaaagtgatggaaccctacagagaaattgaataagatttttttgttgcattataagagcaaaacaaagggaaaaaaagattggtgtgacgatgccttaactcgcacgaattgtccttttgtccacaaataaatggcgggtatactattttactcgtagtaagtcctacgtaacactgtcttataataacactagttttccacccgtgcaaaaatgcacgggaagtttatgtttttgatttaattttgtatatcaaataagaatatgtatatattatgttacacatggtaaaacactgcaagtctgcatgtagcatttattgaagaggaaacacgaaaaaaccttgtatctcaacgaagtgaatgaacatcacaaatgaattattaaatgacaataataataataagagtattttaaaaacattttgaaccacttctttgtactatacatttgtggtaatatttgagttttcacgttctttatcatctattaatgtttttcaaaccctttttgctaataactcttgatatgacaatatatatttaaaattatataatacgtcccttgaaatcatggtgtatctatatttatataaatatgtaataaaatagtataaacataaaagtagagcagcaaccaacatttaataaacaaaggttgaaatactcaaccttgacccgacctatttgataaacgaattacccgtttaacccatttaatcataattattattataaaaaaattaattattttcttaaaagtatatatgagagagttcattgttgaaagtatacatgtttaatatttcttataataattgtgaccaattttagcaatatttattttttaaaccaaattttagatttatcaatatatttttcaaaaattttctacatatatgaaagttaataaagtcaaagcatgtcaatttcgagtcgaaaatgtcacctttaacctacttgtttaatcaatgggttagaaaatcggtcaaagtttcaaccctaacctcgcttattttgggttaggttcggatcgtatttcgtattgagttagcttttgcaaaccctacataaagtagtgacattataatttaccctgtatagtaaatgtaaattaacaaaaaaataaagagaaaatacatttttcaatttaatttattaaaaaaataacctgcaactcatcttatcaaatagacaataaatttcatttatattgtaatatataaatgaaatataattgtaatgtataaatttttcttctaatatatatctaaaaaatgaatatagaaatatcagttattaatattcttcaaaccctttttgttaataacacttgatatgacaatatatatttaaagttatataatacgtcccttgaaatcatggtgtatatatttatataaatatgtaatgaaatagtataaaaataaaagtagaagcgagcaaccaagttgggtggcaatcgcttcatgtttggttggatttgcatttgggtttactaaacatttaataaagaggttgaaatactcaaccctgacccgacctatttgataaacgaattacccgtttaacccatttaatcataattattattatacaaaaagtttcatgtatattgtaatatataaatgaaatatatattgtaatgtataaaattttcttctaatatatacctgagaaatgaatatagaaatatcctacacgatattatgatcttgtaatgagaattgtataaataattaaaatgggtttaaccttaaacaaaagaattaaatgggcttgttatctaaaatgatatgatattgtattgagaatagtctaaaattggcttacaacccgtgcgatgcactacactgaaatataaattatctataataatcagtatcattgttactattatccatacaaatgattaaatggtactaagttaaaagcacatacattgcttaggttaatttaattaacttaaagtgacatttagtggtcaaacttgttcaaacttgctctaagctcacataaattttcttacaatgaatctaattgtttatatcaatattgttacatattaaaaaaatatctattccccctagatagcatggttttcatttgtggatcgacaaaatatgtgcttgataattaatatcataacatatatctaagaaaaaatatgaaaacccaaaatgtttcaatttagaaattgaaatttagtgatatttacatcgaaatcatgaagtgatcatacacaactaaatattgaaataatttaagaaagatataaatgagaaataaaagattagatggcttttaaaatttgttactattgacttgtgaaataatttacatcttgactatttgagaaataatttatattaagattatccggacccgtgcataatgcacatgaatttttttagttctcaaatagtttttttcattccaaaattattggaatgactacatttaaaattgaaagattataaattgtaaatttatatttcatgctataatcttttcattaggactgtcaaaattaaagttgatccaatatgataacccgacttgaatctaacccgaaaatttcgaatttgggttaaaattttcgacccgaaaaaaaagatgggtcagcccaactaactgaccggaaaaataatgggttaggttcggagttgaatttttgaacctcaaaacaacccgaataatccgactttgaagtggggtcaaattcaaggcgagccaaattatgtttatctaacttgtattagaccaaactcgtttcttgaatattctaaatttgattaagttggcatatgaattcagggctcactcaatatgttgaattattgcaatgattaaatttaaagtcggtcattttgggttggtttcgggtcaactcaaaccgaaaaggtcgatcaaattctaattttcgaccaaaaatcgagaatcaagtcaagtttggattaggggtaagtgaccaaaatagaaatcgggtgaacttgaaattaatccaactcgaacttattactatccctacattattaatgtagacaaatgacacgtaaagataattattgtatactacaataatatctaataataatgtactctcttggagtaataattaagcaatataaaaatttgtgaaaattatcaatcccgcaactccaaataaattgtctacattataaatcaaaacctacgactacgggtaaattacataaatggtaatgtaaaatggtaacttatatcaatattaacattttttttgaaagagtatatcaatattaacattttttattattagttagcaaccttgccggaattataacgaactaatatgattataaagcaattccatttgcttgagttaaacttaccaaatttataagattgtaattgatccattttacacgtggcactaaaaaaatgagaataagtatagcgatgacatgtggcgaaatgagtaatagcctgacacataagcaattttaactttgctttatatatatatatagattatgataataccatattacgttgtttcctaaaaaagattattttataagtataaagggtcactctataagaaaaaaagagttattatatacgcttttttcatgatatacctacgacaattttttttattaactatataacccgacttttcaaaattcaatatataccttttagttagtaaaaatacatacatataatgccttttatgactaacagtggttaacactcgccttgacaaagccaaatcgtccaattgcatagaaagaagatcaggtgtgacgagaactcatccaatgcggttttgttttctcagttagacaatatgtcgttctcagcagtagttaattaatcatacccttgaatattgttacataattaagttaaatacttttgaagaacggtcaccagagttttgagtgtccataaaagagggacaatcagaaaagccatgataatcagggaaaagtggtcatcaggaaaagtatggatgccacgagagatcattaatgagtgtcatgggagacgattgtccccaacataaagtggcataacaaaatttgagtgtcatgggagacgattgtcccccaagagaaggtgaccgccatatatcataagggaacgtgtacgaccaacataatagaaatactgcaagatccgtctttcactttgatttatcatgtttcatgaattttaagtatatttcataataaaatttgggttgggagtggtgcgagctcgactagttggtttccacctgtcgtgggttgtttgaaagttaattttgatgcacatgtgagtggtaatggggaggttggtatgggtgttgttatgcggaatagtgatggcaaagtggtgttcttagctactaatcgtgtcgcggcaaaatgtgaggtgatgttggctgaagctatggttgttagatatgtcgtggaggtgtatgctcgattcggttatgataatttggtttttgaaggtgacgcatgcacgattgttaatacaatgaagaacaaagttgttggtgtggcccctatctttcgagtctatgatgatatttctagtgtagctgggaactttgcttgtttttctttttctcatgttaaacgagcgggtaatgttgttgcccacctgttagctcgtgtggagtgtcctagtaacatggagattgtatggtttgatttcttttccctaagtatcactactttggtggacattgatttaatataagttccctagcatttccactaaaaataacatctacaaccgaactgacttagtttatttttattaaagacttgatttcattttatttcaataatttaaaggagtaattaagttttatgataaccttaaatataaactttaaacaattttttttttgataattaaactttaagcaatttaattagcttattaatgttaatcaagtttaacttttaaggatattacaaaaagattcacatttagtcattaattcctattaaccattaaacagtactattaagcattaaccttttaataaacttatctctattatataaaggaagggggacaatggtgtcctcttttgaaatgcatattttgccccccttccctttctaaattataaaaggaatgtcaaaatcaaaatcgacactcaaagaaaactaccgaaaattaatttacaacactcgctcacaaatcacttaaaagaagaaactttacaaatcactcatacaattgacaaaatcacgtaataaaaatcacgcaagtcactcaaataatcaggaaactttattaaaacttaaaattaatatacaaactaaaactaataacctagaacgtcaatgcatacaaaaacatttacaaaaatttacttacaaatcagtattgtacttaattcaaaaatcaactaaaaaattataatattagaaatcataaataaattcaataaaatttctattatgtttatagaatttaactttgaacagtaaaaataaaaacaaaaagaatagtgagagactgaagtgacataaactaaaccaattaaattttgcaactaaaaacaattatacttcgcatgtttaatgttcaaattttggcttttatgccgaagaaaatcgagtttttgtttcgaaaaaaattcaagcacgcatcgcgtgcaaaaaattgtagtttgatatgttatgtcactggagttgttgccctaccgccattgatgctactaagcataaagaagatttgcaaataccgacattttgtgtatatttttaaaaattgaaggatatatggtaaatattgagaagttgatgaaaaaaattatcggagatatatggtgaaaaaaccacttaatataaacggatcactttatatcttaaattgaacacctttatcttaagactaattctactataattgaatccttttagggaataagttatcatcatctcaccataaataattagtaaaccggtcttatactacctttgtattattttagttgcaccatttgctttttcacatttgccgagacgattctttgaacgttaatatctcttattcggtgtaagtaaaaattataaaaatttgatatttggaatcctcgcattgagatgaatctaacaagaccccacttgactatattttttcttatataataatgtaagatagtttaacaaggttggttgatgaatagtgtcacaaaaccaaatggtgcaactaaaaaagtacggaggtagtatgagctaagaatcaaaatctaaatttctttacttctatgtagaggtggcatggatcgcactagcacgcgggtcggcacggtgtgggcctgggtcggcacggtgtgggcctgggccggccttagcccgttcaaggcccgccgcccactatatgggtcgtggacctaccacggtcaagaaattttatttttggcccatcccaccattagcccgcctatatggcccgtgggtcggtccacggactgaatgtcccttttctttgttttttaatctaaattccaaaaaaaaaaacataaagtgcaagtcaggcacggaccgggccgtggacaaaatctgaaaatttcaggcttggcacgacccgacattcatggactcgagcccaacccgttggtgccaaagcccacaggccaagccgtgaaaaggcctgaccggtatccaggtttacttctacgttatctatgaaaaagtaaatagtgatcttagagcttgtttcgttaacattcaaatgcatgagaaattaaaatttctaggaagtaaatatatgtgttgtttgattggtaaaaacatgggaaacagaactctctaggaagttctatttcctaaaaaatggaggaaatacttatttaggtccgcctaagtaagtggaaattctcatggaaaataaaatttcccatgttcaacgaaacaaaaaaaatgtacttcatagaaaaaaaaaaattcatatgcaatgcaaattcataaaaagttatacttcccaatttcaaccaaacaatcccatttaaagatggagggggtgttaaacaaatccctaaaccataaacatactccaagcattgtcagggttttgacaagcaggacctttgttttttcctgacagaaaacgtttaatttcagtggatgatatgatgagacagaatactcattttttcctctgacagaaaacattttatggcccaagatgaatcacaaatgacaaaaacgagagaggttacggacttacggggctaacccaactttggcgacttgtacgaaagttgccttcaattataaatgacaactcacgcagctaataaagtctttgggggccaaaccccaaattatgatgacggcataatcaggcaaacaatagccccgaacaaaagattatctcggacctacaccgcctttcctaggatcctttttttttttttgcaaagcatcactagcacacgaatcgcaaaaatctttctacgtgatttctttggccaaatctttcagatttaattgatccaaagactttgtcaaagtcatatggttaatacatgcaggctaggccgggatagacgaagccacgaccaaccagcaaggtgaccaagctacctaggcagaaaagtgaccagaaatgagcaagttggctgaaaaccgacccactgtgacactgcccttttaattcagtcatcaaacaggtagcatatcagccatagcatatgatgaagaggaaatgacgaatgagataatttcagctgtattcccaatcataattattcaatggagtccacacgagcatatgttcatttacaataacacttgaagtaaataagttcttgtgtgaaggacccaatcatgacagcattccacacagtattaacaccattcctaaaatgcaccccttcccatggctttatgctccattaaaaactggatattcaaaactcggtacatggctaaagacgtacatttactcctcttttttctctgcatcagtaagagatgtttctgcagtctctgctactggcttctctaaggggctgtcttctggcttttctgatggtgggtgttcttcctgctttggagcctctctgtcagtagcttcaacggtttcgttaggagaggactcatcagttgctggaacatcctttgtcttaagagttccaaccttcacatatttactcatgaacttgtattcccaatcctgtaatgcctcgagctcgaaaggaccaaggccagagatatcccccgtcaaatcgttatcttcaaaggacatctttgctagagctctgctggcatccttgccagcaaacaatgcatagggtccacctggaccatagaacatcctgaaacagacatggcagtggttccaaatgttagcaaacttttgagttggttccataagtttctggaactacacaaacattgatagttgcataaacatgttttatgaagaggaagctagtattcggtaagtataaaataggaggtctcacaggtgaatcaaaatgaagtcaggctaaagttacctagagaacatgaaggtatctgtccagtaaagtggaattggaataacttgaaaaaacattcggaaacagtcaccagcaaattgtttataaaaccacaaacagctagacaaaacaagcaaattccacgcagcaggaagatctaaaagtagcactatgtcgtgcaatttgtcattgattaaggtgtacaataatagaattggtaaactctgatacatgagatacaagaaaatcatgtcttccttcaaaggtcaggcatccaaaatatataagttcagttcagaaacaaaatgacgcatggaaatgaaagctccctttctgcatttaggaaaattgcatcagcctaccttcagctggaggagaggggttaatattctcggcctagaatacaaatgactatcacgaagctgaacaaacttcaaacttcccatacaccaatatttgtccaatgataagtacacaaggcaacagagccctcatgaccactctaacttgcaaaatcacttccagtaacaatcaaaccggttaaggacacaacatagatccaaattgcaactaacgtgattgcaatatgatgtttataagttcagcgaacgcaaatattataatggaacatgaaataacattggtgccagtgatgggacaggggatgttaaaactatacagcttactcctgccaggcaaagaaagaagactatattaggatcacagcaaatatcacaataggagaaactgcatatgcaacagcatgatccagcactataacacccccttgccatccaaatttcattccttgaaacaatattcagactattattatcttatccagacaatttaagaaagcatatcatataacgttgtcttgttgcagctctagaagaaacatattactcaactcagtgcacttgtgttgtcatgggtaagtgtgaagtgtttgactcacctattctactaagatatttcattattttgacccataaatgaattttcaaagtgtagatatccatgtcggaatgttgaggatccgacacgggtacctgaggcaaaatgaaggatccgagtgatgtaacatgtatgagagtttagagcgataaaacttcgcagaacataaaaatcaaatgacatatagcatatcaatcagaggccaaaaacatcatagcatgattaaacacttttcaatggcgtgaatgttccgcggcaggatcaaacacaatttctttccctcttgctactggaataatgttcaaacgttattctgattcccaattcttttatacaaccatgtgatagtgatacatcaacaacagcaaaaatgataatagtaatagcaagtaatattaacaatagcaatcaaataaaggctgggaaaaacaaaaggaaaagcacactttacaaaaagtcatgttacactccccaatcctcagaaggcaaacccctaatcctccctttacccaaaatccaataagctgcagctttacaccatttaagcacaaattaactccataaactgattcaaccaatacaaagcaacacaatttacacacacctaaaccctaactcatcccaattagcatcaaaaggtaatccaccccccaaaaaaatcaattaacccaacaaatcttcaaagctcaaaactttaattagtcataagatcatcttcaatcaaaccctaaaatcttccaacagtaaaatttgacccaatacagtaaaaataaaaacccagaaaataaaaataaaatccaaaagaaaagacataaaattgaacaaaacctgctctgagaaacatcatagatctgacccttgatagccataagcaagggtttcttgggatcagagccatcatagtttttcaattcatcttcagtgatctcacccaattgaactggaggaggcaacggctcaatttcttccatagacctaggatgttgatgattctgagaaggagatgatccaaacaacccagaaaccatatgatagaaagctaaacttagagcaattacagtgaagaaagttgcaggagaaagacctgtatatgctgttatggcttccttcaatgtttcccatagttctaaagccattgttttttttgatgaaatgttttcttgttgagaatgagagggtctttgaaagctctgtgtttctagttcagcaattcaacttatggaagtgatgagagagagagagataaatatcgggagttggtaggagtgatgaatgttgaattgttgatgtattggggagaaaaaaggtagatacatttttggtacttgggcttgatttcgcagtattctatgttctttttgtgcagaaagtgctactagcctattagtatgaatttctttttcttgattttgtgtccctagtagcccgtctttgacttgcaccctagcccaacaagattgagagttttcttttacaagtactccaactcaattgtttgagatgccaataaagcttgtttctttgacttcattttagtccagttcaattcaatttaggctatgttcagttcactttatttttgcttatttcaaatctaatcagatcatatcagaaaaaataagttcagatcagatcagttcagattatgcttatatttaaaaatcactatatctttcattacatattagtaaaaattataataattgaatattaataaagtactcattgagacgaatcaaacaagatcccacatgactatattttttcttatatattgagaaaaatctaaaagataagatcttgttatcagatcagttcagatcagatcagatcagaagttcatatctgaaaatttcaggtgaactaaacatagccttagttttaggcgtgttacgttgatctaagttcttattttaaaaaataagtaacctctaataagtttagatcagtaaaaataagatatgacacttttataaaataagctataataagacatataagtttatataaggactataaggtattaaggtctaaagttcaatgaagtttagataactaaaaaatttctctaaaaattccagttcaatctatttcagttgaattcaattcagtccaacaaaaaatggcttatagcaagctagtctaaaacatggtacgaccttgcataattttggaatgcatggtatggacatgagccaagcgcaactcaaaatacgacatcatctatgtggcccatggtatgatattggaatgatagaagtataaaatttaagctagccttaatgacacagtatgatttagcaagttgactataagagccggatttttgaggtggttagattataaaagttactaggtcgtgcctaagcctaaccaacctgttatcacaaaactaataccaagggtagaggtttggtcgataagcacaaattgtactcttattttgtaattttgttacatgtgtccctgaaaatgtttgtacatcatctgaataggccacttcagattataatcctcgttttattacctagttataataaaaaaacataatatttcaattcttcaatacttgatctaattctttcctaacaaaaaaaaattaccaaatcatcacaacgcaatgattcttttgtagtttttgaaaaaaaaaaaaaaattactatcaggacacccatattttctgataaaaccttgacatatcactttcataattactgttttgtgttaattttgtgagttaaggatgaatcatctcaattttaccaatgtctaatggtgcacgcgcttatatgtagagcatggtgcgcacatgtacatggctaacaagttagatgaatatatgtacatctctgttggtacatattcattagttttggtctttgtattcataacctagtgtaatagcctgctcgattttcacctgcttatataacataataattatagcggaagcccgaaaggatcggacgagctattaattgaaacccgctttagcctaatattaaggttaagagcaaaatatcttgaaatacatctatataatattttaaaattccatcataaaaatgcaatttaaacgttacaactccaaatcaacgatttgacacttctaaccactatttatgtcattccaacatctttagttcattattctatacttctttattcatattctacctcccgaatttctaatttcattgtcacatctcactttattcaacttacacatattacacgcattatctaataacacacaccttcacgtcatacacatatgcacatccacatttcacacattgcacctttttcataaaatttcaaattctcacttcctatcctatttttttcttcaaatttgcgatctttcaaatcttaattttttagaaaaaaaaacttcggctcttataccaaattcacgaatttggcgggctggtcacagattgaaaaatcttggcccacacaagtctgttaacggttttcacggttctggcgattcatgggcctaacgggttggatcgggctgacggtttgacatgagcattttttttttcaaaactattaaatcattaaaattattgattattgttacataaaacctctaaaatttatttaaaaataaatataattattaatattaatgaataatttcatcatttttgaatttgatttaattataatactaaatactaatttgattaaaatatatacaattaaattaaaatgtacataatttggttgaataattacttgggatggattaatccgattcataggtcgggcaggcccgaatcttgaaccaagttggacgattttcatagcgggctttcgtgtgctcataatatatgcaccaatttcatggttcgaggcagactgaacctgactttatatgggctcgacccactcagcttacaagatgatgttggagtttataataaatgcttttaaaggaaactcaaaagttgcttcaaaagagaatgtgaagagtcccacattgatagaataataggtagtgtaaggggtttatatacattacactttctatacccattgagttgtgtgacaaaaggacttttagtgggcatgtggtgagtggagtcaccacacgcgcccgcccggtccgggccagggccatgggccatgggccttggggaataaacttaactaaagttttgggtcaaaaatctgttgtttttagccagtaattaggttaccgtttttttttccgaatttcctcccttaatgagccgttatctcctaattacgtgccattatctcctcccactaagtcggctggtaaccacgttttaaccctattattcttttataaatacagaggttactgttctcttgaacacacagaaaatcataaacaacttcttcttcctctctcgaaaatatctttctgggcaatattcaagatcgctttcaatctgtttttccatctacactggaaactcagagaccgtgtacccctagaggttgattgctaagaggacgtgtgttgtagcggggcaatttcaactttagggcagtgaattcttcacgccacggttttccagataagttaaatttatattgttagcggttttagttcctacagatgagctgggttgaattgacccgcattgttggtgatctctactaggctctaactaacattgaactgaggcagaattctactttatctcttctctttctcggtaagataaaatgaaccaaggaattctgcaatggaatccctcttctccaaacacacacacactctcctcatccttgctctcatccatcccatttatccccaaattcaaacgcttcacactaatctcagcaaccataaaatctgttgaagaagaaaaggaagaaaaattacccgcaagagagagaagaaagctccgaaatgagaggagagagagcaaaagttacaactggaaagaagaagtagagatgaaacttatcaaaaagcccaagaaaagatatgcttcttggactgaagagctcaatcttgatacattggcccaattgggccctcaatggtgggttgctcgggtttctcgggtcaatagtcaagagactggtgaacgtcttgctcgttctcttgctaacaattatccagacattgattttaaggtatgattttgaagattatgaagcaaatttcacatttttatgttattttggcttttggggtttgtgaaaaattgtaagtttttttgttcttttgctgggtttgatgttgcaattgtttttatgatatgtttgtatgtaaaatgatgatgagatttggaaaactagagctgttttgatctataaggaaagttaaaggggaaaatttgagtaaaattttgtttctttggttattttattggacattatgacaaggttagctttgcctaattttaataggggtggaacaaagattggaaccttgttgaaatcacacaacaacctgcaatcaatttttgtatgcaacatttgtaagaacatgtcattttttggatttcttatacaacatttgtcatttatcatacaatataagtatttcattaaacagtatcaagtttttccaaccagatttcaactaggaatttctctaaggttatgcaactttcagtattgctttagtagataatcaagtgaaagaaatgtcatacttcctccgttttttcattagatgttacacttttcaaatcatggactcctaggtgatttttggagaggagagagatagagagaatgaaaaacaaaagggtcccatgtgaacatgtgttaggagagagatagagagaagttattacccaaaataaaagtgtaacatctaatttaaaacttcctaaaatagaaagtgtaacatctaaaaaaaacggaggaagtattatttttgcagaagattcttatcaatgcccaatggatggttacttatgaaatttagtatgttaaccaaagtgatcgaacttggaatctgattgggttatgtgcaatgtgaaatttgtgacatgggaattgggaagtactagatactaagtgtggtcgtcaattgcctgctattcacctatggtgcatcactgcagaatcttcaacaacctgttttgctttgaagtatcgtagagatttaccgggttgtttagtgatgggaagttcctggagtattcgccttttttccttggcatttgagaatgacagccttttttttgtgaatgtctttgcaaagttccataagcaacataagaaaaaacatttagcatatcggaaattgaggaaagttacaatccaaagtgcattgcagtgagtatagtcaaggctcctgcatgcattttaattcctgctccgttaagtttcatgtctggaagtttgattgaaggatttctgttaacagtcttcctttaggtaggtgtcctatgaattcgagttatatggaggtattcttaacttctaaaagtaagcatcagaaagtagattttcagataagttattctaagggtcaacacgttccgataggcaataagggttatgtttacatgagggccaattagttaaataaggattttaagtttagatctaggttcttaaagtacaatgaagagtgatgtgaaatatatatattctttctaacagttcttatttttatttttagctttatatgcctgcagtacaagagaaaagaaagttgaagaatggttcttattccatcaagtcaaaaccactgtttcctggatgcgtctttttgagatgtgtgctgaacaaggagctgcatgacttcattagagaagctgatggcataggtgcatttgttggatccaaagttggaaacacgtaagctatctgcaacgccttgtccgcttgatgacagcgtaagctttttgcataaaatcaagtggatctttctctgatgtggtgctgctgttctctttcttcagaaattggttttagtatatgttggcttctcaaaacttgaaggaatgcatagaaagccactcattgtcttcaagttccatgtaaacttgaaccattgtacaccaatccactcattgtagcacactgcacactactcatctaaattatcttgaagtgtttgtgctttgtttctagcatttatgagttatgaccagttacaatcatctaagatacatgttaccacatctaaaaaagttgatgaactgatgtattacaatcatgtttttcgtgctaaaaacctggtaaaaagtccaaactgttgtagtaatcaagtagcagatacatgatggatttattccaactgtaaaatgtgatggatttattaaccacaacacattactcagattctgcatgtagatcatgtagaccagaacttagttggtttagtgaaatgctcctgcccattcactcaaacaaataagcaaagaaggaattacagaaaaaacagataacagagtaacaaggatagtttgattgattttgaagataacatctgagttttcgagaggctcagtctctccagatacatgatgtcccaagtaaataaatctaagcctaaccaggtttaactagttattaagccactttatttgaacccttctttcaaagtgtaaaacttcaacttctatgcttacaacataggggaaacaatttatcttgggcacatgcttgaatagcttcattgaaatgtatcaatgtattcgtaacaaagcaactttggtaaattttgcatcgtatttttcttgctgaatgagaggatcctatgttttttttccctgtctaggtaattactaggtacatgtccagacaacagcagaatttaatttattacaccattttttcaggaaaaaacagattaacaaacccagaccagtatctgaagatgatatggaaaaaatattccgacaagcaaaagaggagcaggagaaagctgatctagccttccaagaagagcagaaactagtgattagtcagtctgagatgggtgatctcgaaacactacttgatacaagttcaaaaagccgaagaaataagattccagtatcttccccaaaggaaagaaagaaaaagctcgccaaagttggttcaacgattagagttgtttctgggtcctttgcagagttttcaggcattctcaagaaggtggataaaaagaatgggatggtatgattttttgactttgcactactatttggttaatatgggaagcagaatttcctagaaagtagaagaatgtaaagttgtttggttgtgtctagaatataaagttggcttacttggctataggtaagtaaaactttccatggaaattttgcttcccgtgatcaataaaacgactttatgcacttataaaactccattcggaaaaaaacttagtaggaaatgttattttctatgatcaataaaatgaccacttaatgtttttttcattaatctttttggacctaaccatatctaaaagaatgccctattttgccgcaggtgacagtcggatttacactatttggcaaggagaccatagctgacttagacatcaacgcaattgtagaagaagcggagtaaatggcgagtgtatttcaagttcaaccttcaatcggtccgtcctgaggctttctcatgtagtatagagtttgtggacttttggttattgtttgtcatgtttagattaatgaatgtacattacgagtgtaaatgtgaatagacactatgtaacgttaagaagcaaaagtctctcatacattcatcttctcttttacttagtaaacctctattggctagaagtataactttctacattggttatgaactccttgccaatggcccaaaacaggcaatactcttactaaagtaacttgagtggtgctctttttccctaatcaaccatcttaatcttttttaggtgagcgtgtctttctttcttgagaaccaccacatctctattctatatgggaagtggggtaggacaccaaaatattagaaatcccattttaccctcataacatccctattctaactacttactttactgaaaaaataaaaaataaaactacctaattaatttaaaaaataaaaaaatattacaaaaagaaaaccatcaagaattcaaatattcgtaatttattagaaataattaataattaatttaatttttttcatctcctaaaaaaataattttgtacgtacgttcgcacgcatcgtgtgcatataaaaactagtatctctattatgtaagggaagggcgagcaggaacgttgcttccacatatctctataattagtggaagattgcagcaggaacgttgcttcctcatgagataatctcgtcattaaatgatgatgaaaatggtggtgaagttgccgagcttcagtggaagataatggtggatgatttaactaggaaagggttaaataattgtatggcaatttgatgtctctggctctatgattggggatccaatggaagtttctggctctatgaattgaagttagagttggtaacaatgttatcaggatcgggatcctactttggatcgtaggggctggtagaatcgaatcggtgggatcggatcgtaggatcgtaagatcctacaattcggtgaaatagagataataattatactaaaatatggtgagaacctcatgttaaaaatttacacatattaataatgattttcttacttagcaaatgatgatagtttttcaatacaataagattgaagtaacatgcgatcaaaatctaataggagaaatataatatgtgaaattactttatgatttttatatggtaggatcggatcgtagagtcgtaggatcgtagaatcgtgttaagatcctaccatgtgattttttgtggttgagcaggatcgaaagatcctacagaattaagatcctacgtaggatcgggatcggtgaggtcctccaggatcgtaaaatcatagaatcgtaagattcggatcgggattttaacaacaatggttggtaatttgtcaataatagttaattgtgtgaattttgaagagttatgttctgtgtgaatataatgtcagtgaactacaatttgtgtgaggctctagtaaattacgtttttttctgaatttttaattgtgtaaattgttagtgaattatgatttttctgaatcgttagtgatttttttacaggaattgttagtgaattttaatgtgtgggttattagcgaattgaattttttccttgaataatgcaaaagtgggttttaattcccaaaatatgcccaaaaaaatcaaaattccctgcgtaccgtccacgtaggacggcacgcgaaaaaattatttttttttgttttaacccacgaaaaccgctactcggagtagcggtttaattttaaaataaaccgctactcggagtagcggtttacaaataaaaaccgctactcgagtagcggtttacaaatataaaccgctactccgagtagcggtttataaatataaaccgctactcgagtagcggtttacccgcgcaaaaaatatggtaggcggatatcggttttcataataaaccgctactcgagtagcggtttataaaaaaaaaaaaaaatttttttttttttataaaccgctactccgagtagcggttttacctaagttgaaaaaaaaaaatctcgacacttataaaccgctactccgagtagcggttttaataaaaaaattctcgcgtgccgtcctacgtggacggtacgcagggaattttaatatttttgggcatattttgggaattaaaacccacttttgcattatccaaggaaaaaattcaattattttttatgggaataaatttagtgttgttgattttgtttttagatgtaaaacttgatgctattctaaatcgattccaaaattttagaacttattgtgaataatggtaatattcttttatttaagtaaaatttcatatgattgtaagtcggttccaaaatttagaatcatagtgaacaattgtagttttcttttattgaagtagttgtatatggattttgtaacattttgtatttagcagttatgatttgtttacttttttcgtatttagtaacgtgcaattgcactacccctcaccagaacttttggatccgcccctgaatcagagagagtaggaacagagaaagtgagaggaggcaaggaggagagagggaagggaacaacagttgagttagggtttgttcactgctacacacttttccttttactttctttgctctttctctcttttcaaagagaactcagtttttttttaagaaaacaggggtagcagatgctaccccttgtgacttactggctccgccaataactatattagaatttccgcaaagatcacaataggagaaaccgcatatgacaacaccacgatccaacactataataaccccccctccttccaggtttcgttccttgaaacaatattttcagactattattgttttatcctgacaatttaagaaagcatatcttgtactgtactatcttgtactacctccggtctttattaatgtacccgtattcatttttgggacgtcccttattagtttacccatttattttgtttctatttttggaatgtgaccactaactttgcatcacacatgcattcaattttaacataaaataatagtttctctttctttctatgtctcacaacattgtttctcctaaaattttgtgcaaaagaaacgggtaagctaataaagatcggaaggagtactatataaggtgtacttatcatactattcaagataaactttctcattatctctatcaaaaactcctccaacttgagaaatgggtaagattggagtacatcggagtctatagttcatcgactgattctcctttcaagcctacgccttgtttggtaagcggagtaggatcatattactcctctcttaaaacaatactagatttctaaacacgcgatgcgtacgacaataattttttacatgcgacaacaattttttcattgtggagtctatcgtgcgacaacaatttttacatgcgataacaattttttcattgtggagtctatttttttgctttattaattccaaatttgattcaaatttatgttcaccataattgcaaatattatctttatatctttgtgctcttgtttgtttctttttaattttgatttatttgttaacgattttcaattctaactattactccctctgtttttttttatcattctcactttctctgtgcgcgtctcccaatgcacttctttgaacttaaatatctttcattatatattagtaaaaattataacgattgaatattaattgagacgaatcaaacaagaccccacatgactatattttttcttatagattgaaaacaattgagaagattctctctatatataaatagtgccaagattctaagtgagaaagataaaaaaaacagagcgagtattatctatcaccgatcgtatagctaaaacttcaaatgtactacgttgtctgaatctgaccttactatcctctatgtaattgacttacataaactgaaattatataaacccattaatattatcatttctttacatgactacaatgttgtggaagtataatactgattttttatattgacaagttttctagtttaatgtaagattttaatatttataaatgaatttgttatctttgttttttagaagctttttcattctttcctttctttacacctaaaatttaagttattctaattctagtttttaaatatgacaaatattttaattgattgataacccatctataaaacccaaaacaaacaaatgttatactgtcacatatactcttccctccccccctcccccacataatcaaatgagacactaagtaataaaaatatgtgttccaaaaatcgaacccatgacctttcatttgatatgctgatgcattaatcaactacactacaatgctcatgttggtcttggggggaaaaaatcatttaaagacaaatatttatgtttttaaagacttcaaatgcacaccagtaaataatgcggggcgtatggcccaagacaagaattagttattatcttaaaaatttaaacaaaagtgatgtttaaggatattatagtcatttaataaggggacaccatgtctccacttcacttatataatagagattttcatatgatctgtcgaaattcaaaggatggaggagaagggtaggagatgatcgtattattttgaagacattaaggatatgtgtaaattaataggtgcagacgtacgtatgatgagtaaggtacgcacaaatgaacatcaagcactaagttatgcacataaataccaataccaatgaacatatactaatagagttgtacatatattcatttggcttgttagtcatatacatgtgtttatttgacttaatattcatgtacacttggcctgttagccatatacatgtgttcatttgacttgttattcatgtacatttgactagttagccatgtacatgtatgcacctttactcactatacggacatgtgcacgatctaatgagattgcccggagctgacgtgtattccgcagtccgaaggtggaagaagtagacttgaaaaaatttaataaaagactgcaaataatagaatctacagaaagggatgagaaagtacgagatgttgctccctcatctgcatcctgtaattacattagcaatccttctatgtcttggtcttcttttcctggaaattcgaccagcagtagtagtatttccattctcaatttaagggtgacaatagacaacatggaatggttaaatttgcagcccatagaggctttcgagtgtcttcaaatcctggagatacgctacaacaagaaggtggagagcttgagagaagttgggctattgagcatgtcagagaagaagcatctgtttgccttgggaggagttgattttacatagttgtgataatctgatgctatcagacgaagaacaagacagagaagctgatattggcattggcctcatgtcatgcccgtcccttcatcactccctccataccttgacattgagttctcttccacaactggtgaagctacccaactggatgcagttcttgaccgctctccaaatccttcaaattcaagattgtacagcactggaatcaatgccgaaatggatgcccaaactaacatcactcaactactcaagaaacttggtgttttccagtgttctgaacagctgaagagaagatgccaaaaagaacccccccccccccgggctggccctatatttgacacatctcagacattgtatttgaacactgcggctgatagattagccccccatcccccgaacctcctcctctcttagtctcttttcattgattttgtcaaaaactaaacgtgttacgcagtaggaacgatttacctctcttccaaaacaacaaagtgaaagtttctccatttaatccatcatcgatgtctaagtagtaaaatctgaattttctgttcttccagtcttcaccaactcacctaaaatttgtaacagagattcatcctggtggaaatcgagattcatccccacaaagctatcttttacaggcatgcagcttataaattttcattaccacccaattttcaagtagtgatggatgtggtaatgaaactttaggaagaaaaaggaattcggtggatgagagagcatttccatgggtaacatgggtttttcattttcttcacaaatttatactacaaaacattgccattaccactacttatgaccactaaacaaataagccgatagtcttcagcgaaagtgaattgcatattacagatggacaaaacaactggatacaagctttacaacggtcgttcctgtagatgggatgtaaattcatccccagaaagcaaacttttacaggcatgaagcttacaaaagcagtggattgctgaagtttagctaaagcaagtaggaatcaactataaagaagcaacaaaaatcatatattcaaaaagagaatgtttcaggatcacatcattgtatataggggggttctaatatctagaggtatgtacaacaaagtatcatcgacaccaaggtcaactagcaagtttgaaagcatcaataaatagaccatatgtgaaacccatcttgaagttgttgagaagagcaatgggaaatgttaccttagatcgactatagtaaaatttggttgcatattcagtaaggagcacacacaagaccgcagcaataacatcattgacacctaaagctccaaaggacaacgaaattgtttgtgccacataaaatccacctaacaaggcgattcccccaaagagcgcccttcgagaaggtttcttgaaatagttgtttgatatatctggtatagtccgaatgatgtctaccagtcttctaggtcccacattatcttgcacagctcggataggaccgaactgatctgatgatgtcgaaacaagagaagcagatcttccatatgagatcttgtaattaggacttaaaccgtaattaaggagcccaatatggctcaaacccactgcattcgccatggagttgagggaaaattgttccctgcatgaatagctagctatgttatgccaaagagctacacacagtacacatgatgttgtttctcatctttccatcattagttcactattaaagcatgctgcaaaagagacaaccaattcctctagaagttactgctattgcagtagtagccacatcatgcaaatattttgaaaattgggagaagcagatgcatgatttgaagcctgaacgggatgctcaaacatcaagccagtccatgcttaggtttataatgcacacatactctgaatatttggaaatcagcaaaacatcccgtagaaaaaataaaattcagcacagtatcagataatcctcctgctgacctgcataaccctatatagccctgagtactgcaaagtaaatcacaaaagtaaatttgcactcacgtttctcatttcctgtcccttgcttttgcccctcgctatctcatggtcgtggggcagggaggttaaaacgaagtcaattagtatggatttgaaaaccaccgcaccacaccatctctaaagctatgcaaatgcaacataacgtaagtaacagtttaaatgttttacaagagtatttgaaagaaaaaaggatttgtaagatgagtgatggattcagatttccttatttgaacaaattggtggaagagaaaggaagggaaatgcagggaaccaatttccttttcctttataaattaaaccctcccaaagttggaaacttttgaggagaaaacacataactcacttttctctcccctcccctacccttcttccctgcatcattgctattatgctacctaaacgcatgtaattctttgtaagatgaaagatgctagacaattagaaaaatcggaacatacaacagcatagcagtggagtgcttcctgatcccaacactaccaagtttcagtgtctcaccaccaatctgcacttcatcattttctttcctttcctaatgaaagcactaaggaaagctacaaggtaattcaaatattaatatcagatcccactatcaagatggtccgtaaggagcaccaagtaggtctaaacaataattcttagtcttatatctatgtcaagaacaaagttgttcgtcctccaagtaaaacttcctcctcattttcctaaggcccaaattagttcactccttgtcacacccaccttgcaagacattagttgttaagtgatccaaatggtgcaaaggggcactcgtggatatgggctaattgtggtctcacacagacttactcccccccccccccagaagctaaatgtattattttagtaagatactacaaagcaaaagcacctaacctcaaggaaataccctgtttagctagaagtacaatattttcataatttcaacaatgtacaatatatactatctgatagagagatcaactaatcttgatagcagcaataggtgccacaagtcatccgataatgatatatagtactaaaattcttcaatgaactaagagtaagagattaacagagaaaatacattcttagcaagggatatactccctctatttttttaactcataatctacaaagcacacaaaacctttgttcccccggtttcgaaaagttcctcaaatctctcagcttttgcatcttccaaaaccaacaattataaccagcgaaacaagaacattgtaataaagatgaaatatgatcgatcatcagaaagataacaaatttggaatgcacattgaacaatctccaagcaaagttttgaaaacaatttgttaaccgattattcagaatccattcaaattgatactacgaaaactgaaattgaatttcacaacaaaaaatttgaaaccctaatgcgcaaatgtcactcgacattggccaaattaaccaacaattatttgccactccacctttaaaattataccagcaacaaagtaatcgcgaaatcaaaaaccgaagcttcaaaaggatagagaaatcgagcaatgaaagtactccctccgtcccttaatagagtgcccatttcttttttgaaacactattcaaaggtaaagaaaatcctcaaaaaatatttctaatatataagaaaaaacatagtcatgtggggcttgtttttattcgtctcattacgtacattaagaaaatcaaacttttataatttttactaatatgaaattaaagatattaacgatacaaaacgtgtattggcaaacgtgcattggagaaatgggcactctattaagggacggagggagtagatcataagatagttctaagagactaaaactaatagtcttttgaacgaagaaacaaagtactaaccttggcaggaaaggtaggcgaagaaagagcaagtcagcttaactcttctggatttgctcttcatattctttttctactactattaaattatattaatgtcctcgtacatgacatgacatgacatttaaggagtgctctctggttttttattattattattattctcacttaaaattttgacactatttatatttaaatagaattttttaaatttataagaaaaatatatagtcgtgtggggtcttgtttgattcatctcaattattactttattaatattccgtcgttataatttttactaatacataataaaagatatttaagtttaacgatgtgcattgggagacgcgcaccagcaagtgaggaagataaaaaaaaaaaacagagagagtacaatatatcccaaatcgctcccaatctcctttcataatattgactatgaatctatgattactgaagaatcttctcatggcctatgaatggaacagtggaagtctagaagatgaaaaagcttaccacccttccacttccatcttcctcattctcccctccaaattctaataagactatttttccctctttggcgtgggtacaaactaggggtgaaagttcggtgtacggtttggattaaggactaatcaaatccgattcgaacaaaatttggatgttaattttccaatccgaatccaaatcaattaaagtttgaatccgatccaatccaatccaaattttcatactctaaattggatctgattcaaaaattcgtttttttaaaacttaggttttcgatgaaataaattaagcacaacagtaggctagtagatttaggaaatgaggaatttagtgttaggattgtaggggaaggattgaagtgctacgcctactggggtatggactaagctttattttataaaaaagaatctagttaatcacttaaatccaatccacatacataatacaagtcatattactatttggttatattggatttttggatctaattaccctcaatccaatccaatccgaaaatccattttttttcaaaaaaaattcaatccgaacacagttcgaatccgattcgtattagattttaaattttatccgagtaactttcaccatgatacaaattacgatcttgttaggtcaaaataagtttagcaaaaaaaatcgagttgttaggtgttagtagtcaatatagtttttagaataatttatgttgggtatgtatactagtagtactaattagtgatttgattagtaaaagaagggttttgctaaacaacgccctagaatttcctagtaacaccctaagtacggtatttttataccgtatttacatacttgtatttctttctctctcctccccttgactcactttcctaatatattctcattttcaaattttctccccttcttcattcactttccctcccatcatcttccactcaccactagacaccggtgccgccgcacaaccaccgccggaccaccaccaccgcactgctacccccgacacaccaccaccgcatacctccaccatcaccccctcctctgttttttttttcatttacagtgaatttttttataaaaaaaaattaagggaggcgtccaccatggacgccccaccaccgggaggcgcccatggcaggcgctccaccacacggtgaggcgctccaccacacggtgaggcgctccaccacacggtgaggcgctccaccacacggtgaggcgcctgccatgaacgcctcccttaatttattttaaaaaaaatttaaaaaaggaggatcagcacgtctcgaacccgaaacattgagaatgttaaatgtcgactgaaatgctgccatgatgactcagctgctgttatgttgaactcaatctcatacttctttatatttgtcggtctgtatgcaaagttgggttcatgaattggagaaggaataacctggacataacccaactgtcgtagtacccgatctgtgttgtacggctcaacaatatctcggtagcgtatgcaactgacatacaacgttgtcggcactgtcctagccgatcatccccgtacggcgtccaaatgacctgaaaaatagaaaacgtgaattaatttgattagtttaatttacaactaatatcgactacattaataaaaaaataaattgcgtacctctgaagcctcaagggtgtccaaccgtctgcgtatcgattggagtcgaataagatccttgctgacgatgtgataatcccactttctagaccggggatcgtgatcagacaccgctaaactatctctctgaggccgaaaacatgggaagtactcatatatctaaacctgtaaaagtgtgagacacctagcaatctatttggccgactgcctagtcgccacccctaactgacgatatagaaaagccaaagtcgttgatccccatgaatacctatgtactgactcaaggtcatccaactcaataatgttctagggcgagagccgggtaccactcttatcagtgaacaacgtacatctaagtatgatgagcagaaaagcgtgaatcttcacatcagcgggatgaccaccacgaccgcatctgtcaaagatctcgctaacactaacgccaccgttcttccaaatgggtgttggctgggtactgaaataactcatcacgagtaacctggagtagctcctcaaagcgaacgtacaaatcatcagatgacaaagcaccacccactatcgaccatcaataggatctcgtataatttgccaaacgtcatgcaatatgatcgtcatctacttgaaaggcaagtgaaacgtgtttgtgtcgggctgccaatgttctataagcgctgaaatcaatggaaagtcaaggtacgaatacataatgaacgggagatggctaatacaagacgcatgtatacgcaactgcgaatcgaagtcccaactcttcaaactatcaaccacactagcacgattatgacacatcatcactgtataagtaaacggatcatcgtagatacgtgcgctgatgtgagtcgataactaggaatcacgctaccatagggcccccaagcatagactccctaactaattagcaagtatcactagcagctctggtcctgctcgaagtccgaatacgtgtgtaacctgacgattatgaaacaaacctccatcctctaccattcctcacagtcacacggagagtgacgtcctctgcaccaccactcaaagaattttccaactcctcatcctcggtttcccaacccggactataaggtgcatcctctggaataggatccggcctaacccgctcttctgccctcaccctcttactcaatgtattgataccacaagatcgagtatgtcgtgagtcgtgacccaaatccctcaagacccatactctcgccgtctaaagccctcgactgagcctaataatcattttttttaattagtcactatttagtcaatttaaactatttaattcaatatctacatacattcgtcgttattttaatattaacattaatataactaaattgtcgcataacatggtaatttcattaaatattatagtatattaacatactatatttaatgaatataattacaaattatagcacgctattaatatttttttaaaaacattattatgttacaaattattataaaaattataacatgctaattaatatattaatataactaaacaaacacgtacaaaaacattcaaaattttaaaaaaaacaatcatggaaacgaattttttttcatggttgctaaatacaatctcgctttactaatacaaccctataaaatatctaaaatatcctttgcctcaaaacccatttctctctctaactactctctccactcctctctctccatcttcctcttcgtcctcttcagatttccatagatgttaacctcacttcctctttagatttccatagatttgaacaaattggggtgattttcatagattattcataattctctctccataattcttctctctctttctccatacatttttcattcgcaatactcaggaactgagtattgggaattgtccccgattgtcgagttgatgtgcaagaactttaagagaagactttcctctcatgcaacatgtccccgatctgtttgcttgatggtcgtcatctcactattctctaataagctcgatttgtatgaaacagatgatactatattccgtttcgtgcaatgtgcacgaaacggaatatagtattttgtgcaaggtgcacgaaacggattcgattgtttcgtgcacattgcacgaaacggaatcaactgtttcatgtagtctacacgaaacggaatcaattgtttcgtgtagtctacacgaaacagactaatcatgcattacgaatcataattacgaaaaaaaattaacaacttgaatcacaatgacgaaaaaaaattcagaaattatatcagattgaaattcgattgggtcaaaattatggtccattaaatatcaaattaaaatttgtagatcttcaatgaagttttttatatctaaccgttagagaggaggagagaatatttttagagagagaaagggttttttagaaagaatgtgataataagggttttttgggttttttttaggctgcgttagtaaagtgaggctgcatttagcaaccttttttttttggtaaatttcatttcctcgatgaacaaggaaacgaaacggcgagatggcggcgttggtggaatttcccggcgaaacgcagcttcctttcgattcatagttgccataaatttgcattttacccagatttcaaataatttttactaattcgctcaaattgctcatgaaattgtttatttccgcaaattttttgattaacccctccagaatttgattcgcaaatatggcgaagctattgagtacaaatcttctggcatcaatggcggtgttgccgttcatcaatttaacatcaatggaggtaagagtcatgttttttcaacaatataaaacttatacttcctctgttctgttttaaatgaaacgtttgttttctcacgcaacccaacccacttttttaataataaatatttttagttgtgtgcacgtaaaaaatataaaaaagttataatttgatagtatcttgtttgagattgtgattattaagagagtcaagtctcacaatattcgaaagtctacgtaatccacctcaaattgacgaagaaaacaagcaggaaaggattaagtaagttcgtggaaccactagaattgattttcaaatatagctctacctaatatatggcctacttttaattttaaataaggagaaggtaatgtgattagaaacaaattggtcttaaattattcattaagcttaataatgtataaacataatcaagtgctatcttcttttcagggccgtcttgaagattttggggcccggttctattatgaaaattgggcccctaaatttatagaaaataaagatggaaggttagagttctaaagatagaaagttgaaaatctaaatataaatcattgacaaatttattaagggtgagaaacaagggtgttttcttcaaatatgaagcaaaattttcaaaataatacttcctccgtttctaaataagtgcaacatttgcataatgtttactattcacagtttaaactttaattagctttggtgatttacattttaggaaaaaacatagtcatgtgggatcttgttagattcgtctgaatgtgaatttttttaatatcaactttttataatttttacttattgataattgaagatattaatggttaaaataatgcattggcaaacgtgaaaacaagaagtgttgcacttatttagaaacggaggaagtatattttgggcctttataattttggagaccctgcgctgttgggctccttgcacaccttcatctacccctctgcttcttttgatacaatttttcagcgacatgattgtcgattgatgcatatattattgtatactcgatccatattgtttaagatgaattgtttgtctttgatggtctccaatgcatattttgtatacttaggaattctaattatgtactattagtagacattgagatgaatacataattgccataatgaagtatgattattttagttatatactttctccattccaaatatataaatgtaacacttgtgtactttatgcgtactaatgcataacaacgtgcactctcatgtgtttaattatatactttttgagagaagtgttacattggggaccatgggactgtgtataatttgaccgcaaaatcgaagtgtcgcatttgattgaaaatggagagagtagtatatagatggaacacagcagagactgctggtcatctttggccaacaaacccaaaattgatattaatcccttattcaggtcatttcatctttttgacacaaaatggatgttgtaggcactgcgctatctgctgcccaatctctgtttgcagccctgcaaagttctgagctcaaagagatcctctcgatctttggctacaaatcccgacttgatgacctccaacgcactgtctctaccatcaacgctgtattccgtgatgctgagaccaaacaggagctcactcatgaagcacagcattggctcgaggaactcaaggatgctgtctttgaagcagatgatctgttcgacgagtttgtcactcttgccgagcagaagcaacttgtagaggctggtggcagtctttccaaaaagatgcgccaattcttttctgattccaacccccttggcattgcttataggatgtcacgaggggttaagaagatcaagaagaagttggatgctatcgcttacaatcatcaatttagctttaagattgatcttgagcctatgaaagagagaaggctagagactggttctgtcgtgaacgcaggtgatatcattggaagagaggacgacttggagaagattgtaggtttgttgcttgattctaacatccaacgtgatgtgtctttccttactattgtgggaatgggagggttgggtaaaactgctcttgcccaactcgtgtacaatgatccaagggtcagaactgcttttccattgagatgttggaattgtgtgtctgatcaagatcaaaagcaactagatgtgaaagaaattttgggtaagattctggctacagctactggtaagaatcatgagggttcaaccatggatcaggtgcaaacccaactacgagaacaactatgtggcaagagatacttgcttgttttggatgatgtatggaatgagaatcctaatcaattgcgtgatctggtagaattcttcatgggaggtcgaagcagaaattggattgtggtaactacgcgttcgcacgagacagcgagaattataagagatggtccattgcacaagctccaaggtttgtctgaggaaaactcttggcgtttatttgtcaggtggaccttcggatcagtgcaagcaaaattccctaatgactttatcatgattgcacgagatatagttgacaaatgtgctcgaaaccctctggctataagagtggtaggaagtcttttgtgtggtcaagacaagagtaagtggctttcatttcatgagatcgatttaggcaacattagaaagagccataatgatatcatgccaatactgaacctaagttaccatcatcttgaacctccaattaagagatgctttagttattgtgcagtgtttccaaaggatttccttatagggaagcagacgctgataaacctctggatggcacaaggttatattgttccgttagacaaagatcaaagcatagatgatgctagtgaggaatacatatcaattttgttgcggagatgttttttcgaaaatgtcggagcagaaaaagatggtgttattaagatccatgatctcatgcatgatattgctcaaaatgtcatggggaaggagctttgtacgactaaaaacattagtggcagcttggataaaagtgttcgccatctatctcttgccagaactagttttgcaagatactctttcaatgcaactcatattcgctcctatttctgtgctggctactggtgtcaggatgctgagataaaccagttttcagttgaggcattagtaccaaactgtttgtacctaagggcaatggacctcgcttggtcgaagataaaaagtttaccagactcgattggtggattgttgcatttgaggtacttagatctttcgtataacgaagatctggaagtacttccaaactcaattgctaaactatataatctacaaaccttacaattgaagggttgcaagagattggaagggttaccaaaacatttgagcaggctggttaagcttcaaactttggatatacatggttgcaacaatgtaacttatatgcccaaaggcatgggtaagttgacttgccttcacactctcagtaagtttatagtgggtggagaagggagttgttcaagttggaagcaatgttttgatgggttggaagatctaaaggctctcaataacctaaagggtcatctggaaatccaaatcaggtggcccaaaaatactacagatgctgtcaaagaagatgttacgagggaaggattatacctgaatcataaggaacatctcaatcacattgtggttgattttagatgtgaggagggtggtggaagaatggatgatgaggaagcaagaagattgatggaagagttgcggccacatccttatcttgaaaatttggctgtgaaagcatattatggtgtgaaaatgcctggttgggcaacccttctcccaaatcttacagagctttttctttctgattgtggggaactggagaaccttccatgcctgggaaacttggatcatctaaaagtcctccgactttcgcatttggcaaaattggagtacattgaagaagatagctcatcagctaatttcaggtgtaggcctggaccagaaagtgcaggactatcattatacttcccctcccttgaacgccttgagttgaagcgtttgtgtaagttaaaaggatggaggagaggggaagggttaggagatgatcaccagccttttaatgaaagcagcagcaatacacaagtccaattacaattatgtcttcctcaattgaagtcattgagaatagaaagatgcccattgctgacatttatgccgctgtgtcccaagacagaaaaactgcatttagttgtatttaatgaacgactccggatagtgcatgctaagagagatgagaatttctatgctccattacattcatcatcatctgatcctgaaaacccgaggaacactattcccattcccatgtttagagaggtatacataaacaatgtggcgtggctaaattcgctgcctatggaggcttttaggtgtctcactcatatgacaataaaaaacgacgaggtagagagtttgggagaagttggagaggtgtttcggagctgctcatcttctttgcgatccttgaatatcacaggttgctccaacttaagaagtgtttctggagggctggagcatctcactgctttggagatgttagaaatatacgacacccataagctgagtctatcagaagacccagaaggtgttgtgccatggaaatcccttcatcactccctcagctacttgcaactgatgaatctcccacagctggtcaacctgcctgattcgatgcagttcttggctgccctccgaactctttcaatagtgcattgcactaaactgcaatcagtgccagattggatgcccagactcacttctctcaggaagcttatggtttcattctgttccgcacatctggagagaagatgccaaaatccaactggggtggactggcctaacattcaacacatcccctccattgatgtcacctctagccttcctaagtttttagtgttgccgtatgaataggtatatacttctttggttttggttcgtgcttccatttagctcaaattggaaatgagcgtatggcgtcagatggtgaccaatctgcagttattgcgctacgtgtatgttctggtttatattgatggcaatgttcaatagttcattataatcccaatcaaatttctttgtccattgtttataatcccaaatccaatttctttggaagattgtgctgaggagagcttgatgaaggaacttgtttaaggttttttctcttatagattatctttctaccattgtttataatcccaactgcatcttggtctgagaaggaattcaatattttttctagttttacttgaggttaaggctgtttataatcacaggctttgccaatagtataatttttataaagtactactgtacagattatgtgaatcttcaaaggtttgagagaatcgtcctaaattcatgtaaacttggagttaaggagcaggaaatggagttacttcaagtgttaatgcaatcagctcaaaaaattactaatacagaacttattcgtgtcacaactcagaagcctttataaattataaaagtagtaaagatttcgtttcgaaagtattattcatattagagtacaatgaataatttgctttggcaaagccatctgaaggtccttaagaaatgtttagtgcaggtgatttaacttgctgtgattatgtcaccaggagaacttgcttatcaaagaattcagtagcaagttggtcgatactcgacagaacatccttatcaaacatgttagtgcagaggtcagagcatgataccctttcattagtattatattttacattattaagaaatatatttacatctgaaattatatatgctgatacaataatcttatgcattttgagttatacattaaacacggtgaaaaacattatttcgagcatctgcatttgtgcttgtggttgtgtaatggtaaattggcaattgcttgacctttgtttaaggctgggtaagctttcaaaaagttgaattgtttagcagtagatcagtaactatccaaacaaagaccaagctatacgccaactgtttcttcacgttcactgtacaagtgttaaagtatcttcaatgggaataccgaaatctaaagtcaattatccaattaatagtagtcaaaagtcaaacatctctgtatgaatatgtagattgaagagtttctgtatgcattcaattcaatgcaacaagttgtattcgttcacaccttattacttggtcaaaagttgactaattttacacaaggaactttagcatcaatcatcatcctactatctacgagttgaaagaaacttgtacaaaaacttgttttaaccctgatacagttcagttaagcctgtttgttgatcagtctgcaatttgaatcactcgtccactcgcatgacttagtgtgcgatcttgtgtctagttttctcgagaccccgcctcctgaccgtgcccagcccaccccaaccattcccagctctactagctagtatcagcatacatgggaagagccaggactgtaagcatgtcgtttaccgagtcacagctgctgtcagcagcaggagatggagatgaggaattcctaatacaagctcttgctactcaacctattgattacttcctaacgcggagcaaaaacaaaaatggtgaagaacattgcaatattatccacattgcagtgttaaatgaacaagcaaagttcctcaatcgagcattgagtatattacccatctcaactctgcatctccttctctgtcagcaagatttttcctactttagctacaaccctcttcactgtgcatctttacgaggtaactttgctattgtcaagctcctcgtcgagttttacgaatcatcatcatcttcttcttcgtcattggttgatccaagctgtaagccatggttagccaaggatgtgaacgggaagacgcctttacaggtggctttggataggggtagaggtgaatgtgcattaaaaataatgggattagatgaagaattgctttgtaatatggttgataataaaggtaacagcccgctatttcaagctgtacaaagaggtagtgaacaaattgctatgaagatcttggcatcagggcattcttatagtactggtggcgagtatgagttgactccccttcatgttctaccaaattgctcaggtgtgtagtattgatttgtttttcaatttgttaaaatttcttacgctttctgtcccttaatttttctcacatgtgggtttgacacagacatttagtgttaagagcaacttcaatggtcagctatgcactcttctaacttagctttccacctcaactacattcaagtaacattagtttcaggctacaacgtccttttgggtgcatttcttcacttgaacttatatcaaaaccgagcttattactcttgattggacctaatcaaccatgatacgtgttttcgggaagttaacagtttcctaatttagttttcttctgtacaatttcaagataactaataaagtattagcaatcttaactataaaaaaagaagaaaacactagcctaatatcatctgatctgcagaggaagtttgcgaacttctacttgacaagcatccagaaatgataaaagcagtcgacaaaaatggacttacaatcctacacaaatgggcaatgatgggtaaactatggccatttcaatttcttttaaagcaagaaaaaagttctaggttgaggaaggacttcatcaaccttttatgtgcaactgagaagtcgacaggcaacaatcctttacacacagcagcttattaccacaatgaagaaactgcgcaggttgtgcagcttcttgtagaagcttatatagatgctaaggaacaaggagtggagcttcagccgagcccttggacatgtgagaatatagaaggagatacacctttgatggtatccttaatcaacaaacatgaaaaattggcactgtatttcatgtctgtggatatggagaattcagttgtatatgcaaccaagagtgtactatattgtgctgtactgcgtggatgtgatgaagttgcagaagaaacagtggcttcagttgatcctgcctgcttcagcttcatgcagcttaaagacgatggtgggcgaaatgtcttgcatgttgcatcaaattgcacaggtgaggtgagagtaccttattgcttgtatatctttcttcttatttgaaaaatcttggaggaactaagcacaagcaaggccaaggcttcgtcgtgctgtggtgggctcaaagaaggcctatgcacagcctggcccacatgggtgcaggcggcctctttaagaaattgaggaggccgaaacacggctggctttttgggcttgtgctcattttcaaaattgatgcccattacagcccacggagcactgctgtgatcttgtgtcgtgagtcatgacaggccagtaacgggcttgtgctgggcaagtaatatggcataactatccttatcattatttataaccggaacatctcatatatgcaaacctttaattctgactttgatcagtttattatagaacatggaaatcgaacatatctcagcagcatattcaagctattgtaaacttctttaaataattaaggtggtagacgtatatgccttgtattatttctggtcaaaatgagtatcagggaaatctaataaaacaatttaatctttacctatatagcaagaaaacagttgggattttgaaaacgggaaaatcttgagtcccatccatttatttgcttcattaccacggaactggggaaatttcacatacttgaagtttcggtgcttcatagattctaacattgaagtgtttatacagagagaacaggcaccttgttggtggaaaagctagcttggttgatcaacgagccagatgatgatggaaagagaccccttgatatagcttcagaagttggtaacgcatggcttataaaattactgctgacaaaagacccttcctcaaacacaagtgcgccatttgcttggattgaagcatgtaaaaaaggctacttatcagcaatacatgctttcatagaccattcccctgattttagaacattttgtctccaaagaaaagactctcctttacatcacatacaactgagaagttacaaagaataccaagaatttcttgctattccgttgattcaagagatgaaaaatatgctcgatttcagtggttcaacgcccttgcatcgagcattagaacgtaaggatatcctccttgctgaagcactgctctctggcgatggggttcatagaagcatcaaagataaaaatggtaaaactgctaccgacctgctagtaaagctgtgcgaccaagagtatgaatgggtatgtgtctccagtctccacctaattcttccaatctagaaaactatgattgcattaggaaatacttctatgtcagttgtcactatcatcccttgcttgctataagtctacattgtcttggcaaaaacataaaatgagcataaatataaaggttaattttttctagggaaattgtactgcgtataccctaaactagaatttgccaaataaccttagagattcaaaatatatccataactattaactttggctaatttgtaatggttctctcttatacaatttattgattcaaacctatttctgctgattaaacttgatcattggtaatattgaagaaaaattctcatggccttgcaagacagtgaagtttccatgaatctcggaaaaatgacagccacaggataaaataagactgctttagacagcatagtagctcttatgttttactatatacaagaatatgtaaaagccttgatctatgaaatgaattgttctatatatattattatggtgatatgcaagctccttctttgaattcaatttcaaacaaaatgcaggatactatgtgcaaacgtacacaaattagtccgtggctaacgacaaactatatcggaacttcccttgctaataaggcctttagatacacaggcagtacaagacttggtacaacaccatcagcaggagaaatgcgtagcacactttcagtcgtagcagcccttctagcaacccttacatttgcagctgggtttacacttcctggaggccttaacgaagatactggcgaagccatcttagcaaagaaggtttcatttctagtgtttatactagcagacacatacgcgatgtgttgctccatgttggtgctgttctgcctcatatggtctatggttagcgacagagataagtcacttctactgattgatcgaagtgttgtgatactcgtccaatcactttatggaacgttaatagcatttatggctggagtttacactgctatatcacacaagtctttgtgggcagctattatagtcattgttatgtgctctttcgttgcgatttcagctaacagagctattctggataaagtgcttgataagttgatcccttcggctgatagtaagagaagaaattaaacccagacactggatggatgtctggatgatgtaggctctcctataatctttcactatcttatgattttggatattactgtctgcaaatgttaaactcacacattgctattatagttctttgttatgcaagtatggattcaactctggactttggtcagtctggtaactagttgcagcccatgaccccaacttttagttattcttatactacctctgttttgtttataatacattggtacaaatcttattcatgttactagatgaacatgctaatgactagttttataatcggcttgttagatggagctctgagtacacatttgaaaaatatatctaattaaaaatattaaaccgactttaaacttgtacgatacatgagattataggaaataaagaatataagttttctaattattatacggttttaggaaaatttagcaattagtttagttattatattaatttgatacttagattttcaattagattatactagagtatataaaatttcctaattatatgtattcggttttcaatcagaaaataatgatttagttttattataaaattaaattactttttttagacggtgcttttctctccaaagtttcctcctttattcacacatgctaaacatggaagaatatatgtagcattattgttttcacacatcattttctaaaggttgtatgattcttattccaaagcaaattaccttcgataatgttgttactcgatatctaataaaaaacttttccatagatgatatcaagaccttaatgattttaataattatccaaataatcgccagagcaactagtactttttaaacaataatatattttttttgacaatggggtaaacaataatatttcttacataaacattttcatattcttagggggaaaaaccattaagaaaaatgcatgtatctattggatctctatacaagtttattttgatagttcgagccctaaattttgtcagcaagtcatatgtaagatttgtgtataaactataaagtgaactattgtttatttattagctatgaattaggtttcacaaaatattatataaagttgaatgatgattaacggaaactatactgatattatcatttgagattttctcttcatgtaaaagaccatttatcttatcccttatctctactagtctactttaagttcttgtgttatgtttaatttttgtcatgtatttacctaaatgctagttttacattcacaactccttttcttcactagagctatttaacatttcaaaatacgctataattttatattagcaaatataaacgtaatgatcgggattccttatattttttcacaaattattagaataggcggtctaatttttacataaattagatgaacttagaagtgaatttttcaaacaaacccattccatttcactctaacccaacactatcttagtcatcccttatcttttgcttcctttgttttcttgattctcgaactacaacagacaattttaagaaataactcggtatttttatcgaacggattaaactagtcactaaatggataaacaagtcactgaatgggttagtgaatgtcattcacgaaatagattaaattggtcacgaaatagagtcactatatttaaaaaggtggcatgttctctgctgaatattagacttgcaccgtgcctaattttaaaagtaggcgatatcttacaagacaactgtcatttttccacttccctaataatgagtaatcatgttcatgtatcatactccttgaacatgacatatatatttttctagaatgaaaaatcacctaacacaaaaaggggaaccaattagaaagagagaaagaaaagtaacacaaacaacaatcaaaacatgaaaacaactagcaaaatttattaagtactaattaatacatctagttacctaaaatgcactctaattactttaaaaagttcaaactccaacaatagtgcaaattagcataaacacttgttacagcaagttgtgcaaactcagacacacagaccacagaaggcggagtccccacaccagaggggcaactctaatttctccaacgtctcctttttctttctcttcttctcctttcatcttctttgctttctccctccagaatctttctctctcttccatttccaggtttctctctcctcttctctgcttcttattttttgaaagatgcaaacttttactgaaatttatgttttgaatagtgttacttattgttatgctttaaattctgagttgggtcactttcatttttgtttgaatttaatgggtttttgctgaattatgctctttttactccagtgaacggtttttcagtttctgggtgttaactgtatttagttaattaagattggtttgaattcaaaaaaaacttagggtttactattttccatgcttaatctttattttttaatgtctgaatatgtaaaaatgtaaaaattctatgttgaaaaactgagtaaaatagtatcaaatcaaagttttgaagctttgaattactgatatgttgtagtttggtacttggtttgatctgtgagattattcataagatgctatctttatttcctgttttctttttagtgcaaatattctgaataaaatatgcattagtttacttttatatagaatataagtatttgggattctaagttatgggacactcaattttatatgcagatccagctgttccagactagactaacttggtagcttgagcttcacttgttgtgcttggatctgttaagcttggaagttttgctgatttagcgccatatgttctagatgtattgtattagtcaagtaaagttttgatatcgaaatttggacctttagtggcataagagtggtttattcttcatttagaattttgaccttgagcttagttttggaattgagtggttgagaaacttcaaacactttggcttttcagtttattatacccgggtttttattgaggaaggtagtgagaaagctccaggaaaatttgactcttgtgtctacagaaaagtcacttagtcttctcctataattttgctgtaatcctggttctggacctctaggctctggaatggcagttggcaaaaacagcagtaacgctggatcattaactcggccatgtcattgtttcaaggtggcaaacttgaaggaaactattttggatgctagcgagacatccgagttaaaagatcgttatgttttgggagatcaactaggttgggggcagtttggtgtgatccgggcatgtgctgataagtttactggagaactactggcgtgcaagtccattgccaaagatagacttgtaacacaagatgatgttcgaagtgtgaagctcgaaatcgagattatgagcaagttgtccggtcatcctcatgttgtcgatctcaaagctgtttatgaggaagaagattatgtccacttggtgatggagctttgtgccggtggggagttgttccaccgattagagaaacaaggaaggtattgcgagtctcaagccaaagtcatcttcaggcatctaatgcaagtagtcttgtattgtcatgataatggtgttgttcatagagatttgaagcctgaaaatgttcttttggcaaccaagtcttcttcttcgccaattaaattagccgattttggtcttgctacatatatcaaaccaggtagaacactcttcttcatctagtttgtgattttagctgtgttactcggtctctttcaattcacctcaatagctgtccatgttgaattttggataatttgatcaagtcagtctggcccctaaacatgttcctgcgcccaacactaacagtgtcttaagcctttggttactggtcaagcaggggagagtttgcatgggacagtggggagtcctttctatatagctcctgaagttctgtcaggaggttacacccaggctgctgatgtatggagtgctggcgtaattctctacattctcttgagttctatgccaccattttgggggaagacaaagtcaaggatatttgatgcagttcgagcagctgatctgcgcttcccttctgaactttgggatcggatatcagaacctgccaaggagctgatcaggaaaatgctttgtgtagatcctttgaagcgcttgacagctgagcaagttttaggtatatttttaatttttgcctcctttgctgaattcagatgacagttatatgacacagtatacatttgtagaacccaagtgtctgaatagccaatcaccaatgtctgacaagttttttttggctttcgattacaaaatcatttattacatatttgcattaactgtgttatttttgacacattacatgaaatcttcattgcttatttgtgattctttgtgaattgctgtacattggaagctgctcccttttaacatttgagatgtccgtaagtggtgagtgtaactcatctgtccccacggagacaaagcttttggatgattttaggacaaatgcatttaacgttctcagcttatctgacaatgttatccatggtgtccgtggacacatgtaccaacactaaacatctagtatttcttgttggttctttagttttgctggatatacttaagggctaaggctttatttttgttcctgcagctcactcatggatggaagaggttactgtagctacggaagaatcacatgaacatgatttggcctgctctgaacatttaaaaacccgagatagctcattttcagcgtcatgtatatccagggatcacgatataagctttggcactggatctgcggtaaattgtgaacctcaatctccaacatttacgtgcagatcttcattctcggcatttatggcggaaccatccacccctacccttatatctgctggattttctttccgtagcagcggtgatttcactgctcttgagtttgtttctccaattccttccttgcctagcttcacatttttcagccctaggtcagtagatgagcatggaaaccaaaataaggttttttcaagcaacagggagaacactgacgaaattcatacaggtaactcacttttctatttgtaataatttgttattgtcactgattctctaatgtcatttttgcatctctaggtcttgtaacattttaaacgtcatataaacatccatgacattttatgtattttgctcaactttcaagtatttttgtatgacttttaaactttcaagttttatctgcgtataacttttcatagcctaaccgtttctctgttgtataagtatatgcgaaaaatcattcatcacatgaattgtttgaatctaatgttggattgtgcagcctaaccaactcgagtttcttaaaaaaaattgttctgtaattcaattatgtcctccatatcttatctttctttacttttaaagcactattgagaaacagaagaaaaccccagtgtgacgactgtcagatgtggtttgattgagattagactattttatcagtgttgtgttattgagattccagtgctgttaatatcattagttccatcgtaagcttttaaagttatcaattcataaaactagatctaatgcccatcgtatttttagaaggggccgacttggagaagcgatttgaatcacctcattcatcgctgtgctcaggaattgatgctagggacctgaaagagaagtcagcagactctaagaggagtggaggaacaggggtgaggatttttgggatccataacaagagaaataggacgattgggcttggcgaattcaaccagcttgatattgtggtcactgaatctgtcatccgatgggcgtcatgcacccacttacctaccgcctcatcactcaggtcttctcttgtatgctgataatcatgggccgaccacaatgtatcaaattaacatcataaatcatgatataaagttgggcaacacgcaaacgtgtgaattctactgctctgctacaagattgaagatataatgggtttgagtcgcgtgtactgttggtgatgatcatcccatattagagagctaaatgttagtaactacattgtaatggatctgcagaataagcagattcttcttcaaaaggtgtaaagcatggattttgaaagcaatggttttctcaacctttttgatcatgatttagtagatatatatagggggctttttgttcttattagatgtgattgttaagccttcttcatgaacaaacataagcactggtgacttgtgggatggtacatagaaagagttccgtttcatcgattttgattttgtccagatcctccttttctttcgaaaaaagggaaggagagtatccgaaagattacccattttgtattttcggttgtctttaaaagattgatccattacctttcggacaatttgattcctataatactcctatttctctacttcatttcctgccatatactactatactaaagacaaaattacttaatacgaacttaaaattaagaggagaaacaaggtaaaatttggtgaggatgatggaggaatcatatgaaagcttacgcacattatatatttgggagtatgatgtacactagttaatgaagatcagacacttttctatatcttttgattcgtatgttctttaataaatgaagatggtatatttaaaatttcgtgtgtatttgaaaatatcatgcacattagacatccaagtctaagattaattcacaactatctattttttttttcttttcttaagatattaagaaaggtaagatactataatcttcctccaatttgactcggacataaattagagaaaaatcaaagttcttaatcacgagaatgatgtgaaattgagtttaattagtagaataaatgtacttaaagtttccatgcatgagaggaagaaattattggagttatatgaacgtgggcatcttgtaaaattattacatatatgttgacttgtatattgtgtggataatactaaaagattcatatatttttgatactccaaattgagctaatgaatgtttgagaagaaaaggaagagaagaatctatctgacacttataaagttataatcacatattcagtgatggccgaccaaaacacaatataatgttctggacgactggacccagcctggttaattcttcggtataaatgcaatgccccatcaatatttacgtgactttctttattaacactctgtagtaaaggaccattgctacgctactattcgctggatttcatacatctttaaacttaatcattaggaaaagcataggttgttgcgttgaccttttcataaaagttttagtatattgtttggccgataatactgcctaatttctttcatagactttatccgttttttcttgatattcctaattcgacttactcacttacatattaatttgcaaatgtatatctttgattatatatagatttgtaattatctacttatacaaatttaatattattaaagtattcattgatacaaatcaaacaaaattcggcctattgattaagtgagtttgatctttacttgtattggccttattacccaagctttagagagaaatttacaggttccagattgaagaggtctaaggccgaaagtttttatttggtggcagacttgtagcaccctcgagagggttgggtgaggctcaatacgaatggtaaagctaaaggtaatccaggacttgtcggtgatgacggtttgattagaggtcacagaggcgaaatccatgaagtatttgcaatgaattgtgggatttgtgcgtgcaccagagctgaatttcttgcggtagtattgaaaggtctgattatagcttgggatggggggcacaaaaaatttacaagtgtcgatggactcagaggtagtaatacgcttgttgatggatgaggttctcgtccactctccttacgttcatatatttgcaagtgcaagtctcatgaatggaaagtagaacttggtcattattccagagaagctaattaggatgctgcctagttggctaaccttggtgctcgatcaaaatcggggttaatgttgattgaggcgatccccacatatcttcatgctgttttattggaggacttggatggtgcggcttggtctcatatggtactagatatgtctaacgtgccttttcgttttcgacactattcatcaaccaactttgttaagctaccttgcatcattatataagaaaaaaaaaacatagtcaagtggggtcttgttagatttgtcttaatgcaaggatttcaaattcttgtatcttttgcacctttcgtaattagaaatcttgacgttcaaagaagcgtctcgacaaatgtgaaaaacaaaatgatgtaatttaaaaaactcgaagaagtattttttttgaaattaacattaattcattgattcaaagttatacgacatctacaataaaaatcaaaacaaaacaaatacatatcaaatgaaataaatacaattctaatttaaaaaatccgaaaaagtataatataccttatattgtgaattgaaaaggatggattactttacaagtttgtgattgtctttgtaattgattgtcctaattagactagttccacgagttatatgtctcatggtgttgtattgattattgatataattctgtccacatttgataccaattttatgtgtggtggtgatcattttgtgtaggtctaccaactaatcaacaactcaacaagtgtacttccttttgcagattctttacaattgaaatttgatttatgccctatttaattgaaagccatcatattgtatctagaaactaaatcttggagggcctagtttcttcacttacatttcactatgaagcataattgttacatacggttttttggtggtccacatgtaagagttcaatgaagacagtatacattacttcaaaatgcttatgttgagcacttgagcctctcaataacatcactagtagcgactttgtcgtttgattggaagcggactactccctccggctctactagtgaaaataactttttttttttttttttgaatagtaaaattaattcattaataaaaagtcatacgacatctacataagcaatcgaattaaataaatacataagttgaatcaaacaaaaatttccttcataaaaactacgatcgtcaaacaaatcttgcaatgtagaacatctcccgcttatatcgctggaaaatacagccttgtttcgtttcattttaaataaatgcaataaagtaatattttatttaagttattattattatctcttctaggaatgcttatcagtcgtgccgagtgtgaactctttttagctcaactcgtgttcatttaagttcatccgaactcaagccgagctcgaacttgatgaaccaagctgttatcgaattgctcacctctgagatgtttggatttttcaaaactccatggacatgcagaagagaaatgctattcccactcggaccaaaacatagcttttacttgttcaaataacaattaaggtgaagcagggtcaatcgccccatctatcctcctgaggagaagtttggtttcaaacaaaccctggttcgaacaggaggagtaggccatgctaatgtgccttggaatatatatatataaggataggagttagctcaagtgggtagagcgctccctcttggcccttgaggttaggggttcaatccttacccccagcattatgcgtttgtgtaaaaattgagaataatttagtcaaaacaaattaataaaaagtgaaatacgcacaatattttgaaacacccataatagtaagtccatgccagacgtttccaccatattggaaatgtccaatctagacgtgtccaccacgaaaacgtttgcccaggacgtttccaccgtcgaaacgtctgcataggacttttttccgccatggtggaaacgtccatgccaaacgttctgcggtgacgcccaaaaaaaatccggcttgctcgtggtggtttgcgtggtgtcagtggtggtgtgcgtgacctcgatagtggtttgcgtggcttcggtggtggttgtgaaaatggaagtggtggttgtaagaagaaaagagaagggtaaagttagaaatatttgatggaaccagagtgattttaagtaattttggaacgatgtttaacaatccctatattatgtgaatggggaaatacgatacaaaattatatgataaagcccgatttctccaaaaatgtgcatgaatgatgttcccatagaacatgcttgtttccataatcttgtaaaaaggttttattttttttatttttttttgataaggaaaaaagacttaggcaacccacctactaatcaggaggccaacctaaaacatcctttcggatgataagggaaaaatccatacagtacgggggaaaccagtacaaaagagaggcgtagagatgcgcctttttagccataaaatcagccgcccgatttgcttcgcggaagcaatgaggaaactggcactccgaaaagaaagaagcatccaaacctgcatccactaaaatgttagagatctcccaaggaatacgccaaactttcctcatagaattaataactaccaaattgtctccctccacaatgagctggaaaatattcagcgaacgagctcctttaataccttcactaagagcccaagcttcagcttggacaatggaaacatggggcccaagggacttagccccagccagcagcacctccccccactgttacgaattacaaagcccaaagcagcattaccattacttaatttagagccatcaaaattaagcttacaaaagtcctcaggaggggggaccaaataagcctcgcaccagatctcactaccatcctctggctaatagtactgacaaaataaatggtttaataatctaaggtttccccttccctgtataatgcagtttactgaatgtccatcaaaaatcccttctaaatgggccataaaacccactgttaagaaaaggaacagattttagcccaaccgttcttaaattttgaatcagccaaattttacatggccgtgtttcatttctactcgattgccaatggacacttgtccaggcctattacattgttaccacttaccaggttctactgaaaaatttacaaaaatatttccaagtatgagcatttttttcaataataactagttattaggcccgagttatgccccgggtaagaaaattttctatttattaatattgtactttgatatgataacactaaataaaatttggtctagtggttaaaactttagtacatgaattatgaggtcatgggatcaaaacctatactatgcaatttctaatttttttttattgtacatggattacatgaactaaaactccctagggagagtgccacgtggcatcgttcctcgtttacgcacgccttttaatatattagtatagatttcaaataggagacaaattcttaatgaacctagtccacactgatctttattttataagtcggggagctatggtgtcccccaatataatcttaaataaagtataaataaaataaataataaaagacggatttgattaagtgatataggcttaatcaacaaaattaactagcccaaaaaaacatgtctaatattcaaaatttacttttgtttatgtccaaaaaaattataaattatgttctaaaaaagtgagacacgcatcgtgtgcatcaattgctagtactaatatagaccaaaggccatacataaaacgtatatttgaagagaggtcatctaatttcacgcatattcttttctctctctttttcctctttggcagttctctatccataatttttttcttctctcactcaactttaaaaaaatttcgtcttcgctaggatgaagagatgacttcgtttaggtacatactagttgcatatgcacgcgatgcgtgtgtcacaatattatgtagttatatgcaaattgacatgtttcttttatctaaaattattttgatagtgatgtaaatgattgaggttcttttgtagattttattatctttttaaattgaaggtgaatgatttttaacctagtctaataccgtcacggtaaaatttggtcaatgatttaataattttctttttagcgactttagtatagtactttaacaattctagatgttaataaatcatattgtttgaactttgtaaatatgaaatattatgttatcacgatatgttgctaactttttttggttgaatatgtcaatctaatttgtcaagttattaatggtattggatattccgatccatttttgacctactcatatggcaagtttcattggttctcatttttcaattttttataaaaagaaaaaaattattttaaattactaaagggtaattttagttatttcagaagaggacaccacacctcctcccttggcttatataataaagatttatcttattttttattttatttcacatttatttatatattttcaaatttttgtgtttttattttgcaattgattatgtagttgaatatttgggtttgagagtttttttttgtagttatcacattttaaccaggcacaaatgccaaaagaacatgaaaacaataaaattttagtatggttttgttgtttgttaattcaatctgcttgatacttttgttaagaggattgttaaacatcgcccataaagtacttaaaatcacccaaaatatatttttatagcccaatttaccctttccttttttctacactacccaccacccccaccaccaccaacctactgccatttcacattctcttttccccaccaccccaccaccacctaccttcccactaccaccgtcgacctccactgcagccacctttgtgtcgaattttttttatactcgagaacgtccggccaggacgttcagcccatggggcgattgtcctggccggacgttcgccccatgggctgaatgtcctggccggacgttcaccccatgggctgaacgtcatggcgggacgttctcgagtataaaaaaaatttcgacgcagctttgaataagagttgaatggtttttatttgattttttgggagtaaaccgaatcatttttataataatctgactaaaaaggaaaaatgatgaagtggagaagaaagaaaaagtgaagagtttgttaaaatggtgatgatgatatattgatgtttttgcagaatttttaacttcattgatgtggagagagaaatagagaagtagttgtagtagcagactagtagtagtacttgaggtaggggtccatactagtagttgctagggctactagtttggcgtggcgcagaatgcgtgagctcattcaggagagagagagaagcggttagggtgagggtggtacgtaaacagtgaaggagagggaggggtaatttcaatggaggtgagggtagtggagtgaggtgcgtgggtggtggtggaagtcatgaggtgagggagatggtggtggaaggcaggaggtgagggagatggtggtggtggccgcagccaggcagacaggaggtgaggtggatggtgttgatttaaaaaaaaaggggaaggttataaatgtaattgcattgtttttttgggcgattttaagtaattgttgggcgatgtatagaagttcagtatgttaattgttggaggtagtccttgtgttcaagatgttggatctgttttatgttgttggttagggtttgcgtggcaagagatttcatggttgggggtttgttttatccgattttgaaaatcggatcattcttcatgatctaacaatgtttagatttcaatctcgcttggtaatgatttcatcaatcgttgccttgacaaaaagatatctgaaggcggctctctaatttgtcaattgggtttatagcgtgtcaactcatttgagtttttccttaaggagaagcctaaaatacccttcgaaaagggtattgagtcacaaaggaatgtgactcttccaggaaacacgatcgtagaatcccatgtgacagaaggtcactgggattggtcctgttgcgagttcctaatctcgctgttactttattacctcgcttttgaaatcagccctctcctcccactcctttcatcagggttctggcgatcatcatccaccagctgaatagattcattacaattatgtatcaactcatacctctttatcgagctgttttatcctagtttaagttattcatgtttttgtaattgttatgatagaacgagtataactcaattaagtttctttgtgtttgtttggttgtattagcgatagactgtacttttgttttaattaatgcacattttctccgttgtaaaaaaaaaaaaaaagatatcttctctcagtaaaacctgatgacaagatctactaatgaaagaaaaactatggataacaatcactagatcattttgagaatgcactcttgaatagtggatgttatagaataatccttgattgtgattattataaaaataccagtaataattgagaagttgatattaattctaagatcatttttatgaaaaacatttaggaaaaatcgtaatagataagttaactttttagaattttttccttacataatgcaaaagtgggttttgattcccaaaatatgccctgcgtaccgttcacgtaggacaacacgcgatatttttttttttttcaacttaagtaaaatcgctacttgaattagcagtttacaaaaaaaaaaaaaaaatttgtgtgtgttgtataccgctacttcaagtagcggttcattactcaagtagcagagtctgatttgtgcttgcaatattttgcccatgtaaaccgctactcagagtagcggtttataggtttatatttataaaccgctacttgaagtagcggtttttgtgggaaaaaacaaaaaaaaaatcagtttctcgcataccgtcctacgtgaacggtacgcagggaattttatttttttggcatattttgggaattaaaacccacttttgcattattcaagaaaaaaattccaactttttagctaccttcttgcattacgttaatctttggattattccttaaaaacctttttgttggattttttttttgtcatcacatatttatatttccgtggacccaccaatttgaagcttgtggcactgatgaaaacaaagatccgagcttccgaaacaaaaacccaaccgcacatttttgttacatttttccttcttttaatccccaaacaatagaaatcagaaatttatttgagtagaaaagggttggaaattagtaactcaaaagatgagttatcatgttaatttctccctaaaacctcaaaatccatgtacatatattcctgctaaaaaaacactaccttcttctttactaatttcatattgtttatcacaaccaaaagtacataaaacccatatacaagccctatcttcatcttctcccatacaaaaaacccaagaaaataccacatataatgaaactctagaattaaaatcatcaagtaattataatgttgaatttaagactatgggaggttgcaagcttggtatttcaagctacccagattttgagtatgatgctaatggtggatttgggagtggaagtggcaaagatgacttaaatggcaagattttggttgattttgatgttggtaagctttatataccatcattaacaagtgggacaactaagtttttggggttgcctttgccaccatttttgaggattgatattgtgccagagatcttcaaaggaagcattgataaagagtcaggcaaggttagagatagtacaagtttattaattgaactttttcatctggcattttggtgttatttttgcttgtgcactctaggacatgcttaaatgaaggattaataatatgacttgcgactatatactcgcagctaatgtgacaacaattgggggtagtaaggggttaaagggagcaatgtcatatttttactataatcatctttatacttccatttttatactaaattattcaattttttaagtcatgttgtctaatttgctagttttgaatggtaagtcgtgtggcagcatagtattttcttagcaatatactagtaattattgtggatatttgtcgttgcatggagtatgagattaagggttttatttacaaaaagaaattgtttacataatctttttaatatccatattacttcgttttcatcgttatagcatttagctaataattaactagagttaaaaaaagtaatgcgaacaaatggctttaattttgtagattagttggtcctatcccattttcataagtggttgataacttgacgttaaagaaagacgtaaatggtagccgttacatgaacaaggtagcatgtggcaagtattctaatatccagacgccttttctttaatacatacgtacatctatattatgatagctgagttttgttgttttatgtacgttacttattgtaggttgatcttgaattcaaggcaaaattctggttttcaatgggagcaatttacaaagcaccagcattactagtttcaacgattttgacctctgaagaatcacaagggcaaatgagaaaggggagaggacaaagattggagaaagatggaaattgcaagttagtaggggtggcaacaattgatccaattgatgatattttcatgaactccttccttggcctcccaactgaatgccttgcctttttaaatgccacaatctcgctatgaatatcatacatgaataacctattttgatgaatgtataatcttttagatttaaactttttttatacatgaaagtatatatataagttcaaacttcgagctctaattaacccagtaagagaagattattcgattgtagcaatacaaatccttcaatcatctttgtcacactattttcatcatgcccatattattactgggttgctaaatgacgttctgaaattccctaattcgttctaattacgccctattattatgtgctcttaagagcatcaaaaataggttagcgtgcgcacagcggcacaggcacacacagagcaccaaggatagtgctcttagttaaggtttatcaatgtaactaatgcatcattgataaatttcaaatcggtttcttcacaaccacatatgaggcattgtttggcgagtgccttccaaatgtaattcatccctaaatatatcaattgaaaaaatgatgtaaaatttcattgtttagtgatattacctccgtatatttcgatttaacgtttacacttttgcattatgttaatacacacattgtccaaaattttcaggcttatgttacataaattggtgtgtacgataattttactaatcgataattactaatagataattacatatattagtgatcacagttatttgttgacaaacatagtattgcagctaattaaggatgcaaaatattattttacttattatacaatcttttgtgacataaacatatttcatatgttacataattcatatgataattactaattcaaggtcacttaaataaactttgaccgtaaattttcaccattatataagaaaaatatagtcatgtgaaatcttattaactgtaatttcgttattagtctttggtaattgagtttgagaaaccatcaaattttcataattttcactaatacttccttcaattttttttacttgcaacattttgagttttgtactattcatgtacttatttttacctgaaatttccgaaagatatacaatacaaatttcagcttgtaaaatattattgaatttatctcaatatatgcttacaaagatttaactttttataactttcgcatacaagaaattagatatattaattattaaagttgtatatcctacaagtaaaagatctggagaagtatacaagttgaactactaatggtcatagtgcattgaacatagtgaaattataagtgttgcatgaaaatgagaaacatataaagtattgctttcgatcattatatattataaatttaacccattctacaatcttatgtgacatgaaatatattgctaataaaacgtataggtcaagtagtcaactgatttacatcttatccaaagtaacaagtatacatggatttgtagttacaagttcattaatcattagtacaaataaagaaaattaaaagtatttaaaagaattcatatacagtcattcatgcctttgaagacgctaactgcatgatctcaacaagacaaacactatataaaatcaaagacagctgattgcgtgaatgattaaatatgatgaataaaacagaaatctgtgctcatctattgcgtgtgaagactgtgagctaatcctggacttttcagttgcaatttgaccaccataaattaccacttaattacatcaaacacgatcgaagttcattgccaaagatctttcgcaattagcatccagaaatgcagtgctttatacctgttcctgtaaacaaaaatattgtttctcaaacacaattaccaaagactaataacagttacaacaatattagtattaagacactaaatggatgcaagctgcaaatttcgcagtacagctttctgtacaatgcagaaggtgggagagggatcggcagccatatcaacaccaaagaagataaattcacaggccaggctccactcagatatgatttcaatctagaaacatttcacgttccaccattaacaagcacgacagcacagtcggacgggtggatccctttcccaccttttctgaaggttgatgttgtcccagacataatacaagggaacatatatgaggaatctggaaaggtaaatcatatactgactccacagctaaatctgccactacgtactagtttaattgttgagggtgtcgttctcttcaccataaaaataagtttcaataagtaatataatgagttcagcaaaaataaagtgaagagaccacaccctaagttagtgaaactatttgtctgaaaggatatagttactttgtacttaaggaggtggtgttttcctgtacaggtcgagctaaagtttaaatccagattcttggtttccatggggagcagctataaagcccctcctctgcacataaatatgatattaacaactgaagagctgaagggagcactaactaagaagagcgcacgagggatgaggctgggcaaaaatgggaaatgcaagttggttggtgtggctaaggttgatactattgatgacaattacataaattttcttcttggtctgccttcagaatgccatgccagcttcaaagctattatatctttttactagtttagactcataataaacccagaatactactgtaaaaggaatttcactgttccaggtcaagaactggaagagaacggaatgatcaattgattataggataagtcagccatgaaagtttagatgcaatacatggcagtattgcctattgcttaccatgtcttataacaattgaaacagcagccaattgtaactattgattattgtccttctaaacagcagagagcaacaagagctttcttagttcttcttcatcttgtcatcattgtatagcagcattcctttgaaacagaagcgtatctgtgtaaacatttgaaaatcaaatccgtgacaacctcaattggaccattaggggggaacttgcttgaaaattattaaaccacctgtagtaatgatttaaaatgacatttacagcacagatggcaatatcctggaacccactggctgatactcactcaaaagcaagcctctggcttcctactaatgaagcatattggccattttgtgacgacaattcatagtgtgtcccgagctccgcaattctcccatctgaacaaagggcaatttgatgggcattctggactgtgcttaaccggtgagctattaccaatgttgttcgccctttcataagatgattcaaagcatcttggaccaaacgttcactaactgtatccaaggcactcgtggcctgcataaaatctcattatggttagatctatttgtctatgcagccatgaaagtttggaaacaagatggttatgtgagtccattgacttgactgtttgaagattgacacaatccacaagtttccttgggaagacaaaacaaagtaactaattaagtaagagaataaagatgcctgaaaataatcagatagtagatcaaaaaagcaggacagtagatgatggcagatgcatgtaattagattcatgtccttgcaagtgtcgggaggggtataagatagaagaaagagccaattctctaacacagcaaaaattgagagctaaatgtgggtaattgtcaactaagtaagaaggctaaatccataatcaacatattgtgaatttgtaatgaaatggcatagcttggactggatttaagaaactgatatatataactaagatgaactttgattgataatttctgggaaaacagtaaaataagatgataattacaagctttcgagaggcttgttctctcccattgaactctcaaaagctcgtccaattttcctaccaatattcaacatactttctctctatactatatatagagatatttccccactaactccctaacttattcttcaagctactgttaaacctaactaattatgcaataccaaaagtgcccctttccctaggttgattcattacacatatcaccagaagtacaagtccagaacagctcaggaggagacaacagaaacataaacaactgaagtacctcatcaagaatcaatactggagcatttttcagaagtgcccttgcaatagcaactctctgcatacaaaaattatgtatttagctttgtacatcttgagtttgcttcgcagaaattcagtgcaacgttaattcatattatacctgcctttgtcccccactaagtagacctccacgctcccctactagtgtgtcataacccttcgatcatacgagaattagtaagagaactatcaacagagataaatgtccttgtttcagaagacaaaaagcacctctgtccgaggagacaaacctgtggaagtgatatgataaattcatgagcattagcagcttttgctgcttttactatatcatccttggatacattagcatcaggtagtccatatgcaatgttctctgcaacagacacagagaagagtactggatcctgcacaaggtttaggtaactttaagcaattcaacaatcatgaaactgaagaatgccactcaatgtgcaactgctccatagcgataaacatagtttatacaagtgattagaagttaccagtctggcaatttaccagagtaagttggctagttttactccaaatgcttgaatgaactttagggttctgttcgaccgaccagtcaaaaagcaccttttgataatttattcattgctaattatagattattagaacaattaaaagcttttaaatgacactaagaacaaaaagattttcctcttcaaagctaaatgccttttgaatcaagtttttacatattaaagaattattgattcaaagtccaaaaagggccaaggaaatactacttattagataaataggtgaaaagtgaaattgtatgtttgtgttctataacaacgaagaagaaaagaaaatcagaagggaagcgaaaataagtaaaagaaagctagaataaagataaataaccaacagagagagcacatgtagaaaagaacgtagaaattaacaggaacatgaattttgaagcaccagactcaaaatatagcttcataaacacaaactaaaagtcataactcataacacaatacctaccaacgatgctacctcttaactatgtgaaccttgatacaattcaatcaacttagttcacacaaggtttgaccgaatcatttgagctgaacatgagcaatccaaaattctggttcaaatgggctgcggagaattttgtctttctagtctggtgtttgacaactctagttcaagctacaccccataccatgtcgaagactaagctatctaattccaaatggaaaaaaaagaaaaagaaaaagaaaaaggaaaaggaaatgagacaagagttcagaacgaatgtttaacagctgaaaacatacttgattcactattgagacagctcgagcccattcacttttgtcaaatgtccttacatcttctccagcaacagctatgcgtccactggttggctgcatatatgttaccaggatagctcatgttataaaactgtaaacagacataacttacaaaaataacgaagaaagcatggatgacagaaaaaaaatgaacctcataaaaccgtgccagcaattgtactatagtactttttcctgcaccacttgagcccacaagagcggtaactgttccactcttcaatgtaaggttaagaccctttaggacctcaacatcaggccttaatggataagaaaagtggacatctgcagtgatgtaatatgcaatgttagcctagtaactaatattcggaaacacagaaaatattcaaggttgaagtaactgatagaatatattttcagcaaagtcaacagaaatcacattggcacatttacagatttgctttacaatgagctaaattaaatgtctcacgactaccctgtcctttgattcctgttagcaatgaagtaaaatgacattgtctctaagttgatgctaaggtaatgctacgtacatatgatcccttaactctcacagcatcacaagagcctctttcaggcactgggaatataatattgatagaagcaacaaacaagaaatataaaggaaaagtcacatacttgaaagttgctaaaaatgtaccttaatattaccccttccatttctaaattataggccacatttgattgaggccatttcaaaaaattgagttgaaatattataattatcaatacaatattttagattttacatatccatcatatcaatgtaatatttcttttcagattcttagttaaggttatcatcaagggtaatctagcaaagcacaaagtttaactcgccaagtttccgaaattggcatattattttggggcaacctaagtctcttatccagatatgaagagagcataacatagttgcgcaccctgaagctatcaccaaatgaactgcaatccattaatctaaaccctacttgtatttacctgtgctgggagtagcaagaagggttttcaagggaagtcagcattattctaatactgagtggatgaagtggcaggttgtcagatactggagagaacggtatctcagagcctctagaagaaggtgggggttagaaggaattttgaaaatgtaaccagatttaattttgttgtgggagtaagtcagcttgtaattagcttcgtctaaatctagctttatctttgtcttttttcctatcatgaatcatttacaatcttcttcatcctcttaatcaacatcattgtattgggtttagggataatatgaagagtaaaatatagttaggctagcttggagagaaaggaagtatgttagctttatactccctccgtttcctaaagatcttcccacttactgttcctacagataccaaggaaaatcaagttgtgtggggcatggtgtgagtaaagtaggagagagaaaggggttaagataaataaacaaataaaaaggggttaaagtaggagagagaaagggagtaaaattgaattaataatgtaatggtggaccatatgatagtgacatgagagggtaaatagggaagtttgttttgccaaataaggaataaagcaaaagagggaagatcttttggaaacacccttaaacggaaagagggaagatctttaggaaacggagggagtactccctccgtttctttttaaaagttacactatcttttcacccttgtcaatataaatgttcgaacattaatatccctaaatttgcattcgtaaaaattataaaaagttgatattctagaagtacatattgacatgaatcaaacaagatctcacatgactatttttccttacccatttaatcacaaatgttagtcaaacataaatttgtgaatagtgtcaaaactcaaagtgtaaccattaaaaagaaccggagggagtatatagaagaaattagtcataaaaaggggtatgaagaaaatctttgagagttcattttagtggttagcttaacagtgtgtcgagtcactcgagaacttgataaatagctttacatttttgctaatttccatgtttatcaatcaaaatcatcttcctcttcttttattttactctccgaatttccagttcactacaatcattttcagcttattacaagaaccaacaactaaagcacagaaggcattagaggcatagaggccatttgtcatatatcttgtgtgggaaaatatggagcctcaacactatgttattgtaagcattttggagactatgatctaatacaaacacgtttctaagatactaacagcaaaaatgctgctagcctagcttgatataaaagattagatgggaaacctgttgatggcttcagggttattacttattaggtacggaagatgatgattggcatttatcttgttgttatcctgaatcatgttcatagagccgattctagaggaaagcatgcactttatgatagggaagaagcaatctgaaccccccccattcaatcttgatggtgtagcagttgggaaatcagcttgttggttcgctggtaagtcttaactgcttaatgaagatcttcttgagggtttttttagtccccaggagttcaagtgaagctggaaaacttctactattcaaaaccagatcttatgaaaactttcagaattagtctaaacttcacgcaggcttggagagcgactctatagtaatttccaatgaaagaacttgggcatagtagctgggagaaatttcttatcttttattgttagaaagcaaaacaaggtagctcatttttttttttttttttttgtggagctcccaacatttaccctaccaaagcagcaaaatgttgattgacacataaacaggtatgagtgtacgacagacgaaataccgagctaatacagtatcaacataacatacttacgaaaatccacataaaattaccttcaagactaatgtcaccggaccaggctacgttaaacacgtcatttgatgagcctaaggctgacatgtaacgcacgtgattagatcgttgcttttcatcagatccattgacaatgaacaactgtaatttttcatcttgaatatcttttggttgaatctgtctttctaaaccataagcaagagcctcatcggtctctgacccagagagaatcgaattaattctctcaacagcagcaaaagccccacggagatctccaaatgagtaaaccaggccttgaacctacatagcacataatgaaatctataaggcacaataattgaaagttgtataccaactcagttatttgccacacgagagtacttacagcaaatgtaagagtaaaggtatatccaatgaaagaaaccacagttccaactgagagttcaccctgcgcattccattaaaacgtataaggaaacatacatagaaatgctcataaaacttgctagattattgtggtgcttaaggttagaattatctgcagctaacattagcatttaacaaggaaaatcagattatagagctgcagacattagccaagagaagaaactatactcctgacaatcaatgccctcgcacagaaattacagttctctctgaacatgaatgtcacagttaatactctggttttaataataagcccttgcaaagtagaagagaatggctttagcatctaatgagaaacaaagttgataaaataactagagacattagctgggagaaggaacctatgctcctgcaaatgaatgcccttgaacaaaactacttttgaacatgaactgaatctacgaaagatcctttggaagcggatatcattaaaaaccaagaacaattactccatttcccacttcagagtaacaaatgactcacctttctcttctgaaggtcacaatctgcccacattctttcacattttacatgtaaaattattcctcccatcagtaactaaaagctattctttaatatctccattcatatcagtcaaacacccaaaagtgcaactgagagtgagcagaaaattaagaaaataatacttaaaaaagatcctaaaatcactggttgttgatgaacacaactaaccgctttaactttgttccctccaagacaatacaaggccaatagagatacatagactgcaactcgggtcactgattcattaatggatttgtaagtgcccagctgaatgccgctagccttatatgcgaaaatctgccatatcaaacagcatacatatcaaaaaacaaaaagcaaataatctgattcactttatcagatgatgcatactcaagggtatgacatatattacctgattaccgaatgctgacatttggcgcttttccccaccaaaggacctcacctgagaggtattgtatttagtgttcagtacagcaactatctaggtcggaccttgaagcccatagcccagaagcaaaagttatagcttatggttaagaatttcaccctcaaaggagcttacgctagcaaagaatgctaaaatgccaaattgcactggcacaacttgctgaaacagtgaaactcaccgtgcgaatagcagatattgtttctgacacacaatcagacattgacgactgtgccaacccatgagctttaaagataggcatagttgaccgcttgtacacagctgttaaagtaaacaagaggatagaaataaataaataaaaaatcggtgaacgaaacgatctgcagaatcattcttcaccaggacttgcaatcatactaactgcgaccttgctacatcataaactatatcggaaccatagtagggaaataaacatgatcataaattattgacttaaaatataaactactcattgacaaacagcctgtcaaatattaaaaacacgaaatcatgaattcttcaggatgcatgtaatggagcagccagtaagattgtgtcatagcaccactgaatcacaattcttaaataaatgaaaagtcaaatatgcatccccctccccacatgccacatagaccgatacagagagagaggatcacaagaatgttctatagccaacatatgtgagccagcacagcaaataatgaactataaaataagtgatagacaagtcacaactcacaagactaaagctattaaaactctaaaactagtccttcgtggcatgttatggcacgctctgttatgctcaatttcttagaaaaaggcaaaaagctgtagaaaagttggattgatagtaactaaaatctagataggaatcatctttcgcttatattattttcctttagtaagaaaatccggatattgtcaccaaaatcctttacaattgtgcatacttctacaagaggtcagtttccctttaggaatcaaggagccatattctgcttctcaggtgtataaaggcctttatactcaattctaaagttaaaaggaaataaactcatacttcaacatggtgtcaaagcttgtctgaaaccctcatcagcctcccctctcaatcttcaagttccgcatggccatcgaaatgaatcccaaatctgaagtcacatcaagtccaaatcaatcgcttccaaagcaacatggaaagtcaaagagttttctctaaaataaatggccactatttccatcaatggccacaatacgttatgctgttcatacgcgggcgaggaaaggatcatcaagccacagggttgttactcccagaccaagtgatcccgatttcaggaatcgaaatccaaaaatagtatggtgatgtggcaaggctgattaattccatgaccacacaatcgggaagattgtctcctatactcaactgcaaaagaaatttggaatgttgccagagatacctacgctagcaatgacaacactgaagaattgttcgccacctagagcactcttcatgatctacgtaaaggagattatctgtcacagcctacttgtgactcgatactgctaagtgctaccagttagatcttcacaaagaccacgcatggaaatgcactaaagacgaggatatatttttaagaaatatagcgataaaaggatattcctgtatgcaacaggtgtaaggctacagccattaccgcctcaagtcagccagccacataactctgttcaggatacattggtatattttcaagccttcaaggagtttcaggattgagagaggtagaatccggaagcagatgatgaagctggggctggtcgtgatgctgatgggactggcgggtggaggtagtttagaaagggtctgagagaggttggatccagtggaggtgagtgacagtcacagaagtagtaggggtgttggtgctcaagtattagggtaggagatggcaatgctcaacttgagaggatggtggtagcctagattacctggtaggacaaacttgaaagtagtgcgtgctagagtgaaacgtaagtggaaatcaaagtcctaaaggatcacgggggaatcaagaatgcaactagggtagactacttcatcaaaaataaagatacggatccgtaaagaaaaaagaaaatgaaccaaacaccaataaagggaaatgaggtgaacaatttcctttcccattcatgaagacccgaattcaaataatctctaatttattaacgacacgttcatgaaattaacatcaaatcgagaaattgtgagattttggacaaatccttatctttcaaattggtatagcaaggtcaaagttgacgatatgttccacttgtaagcaaggaattgccatatgttacacaacgaacggaataatataaacaaaagagggatgtaaacagtctgtaccaactaaaatggagacaacaagcatcagcaaacccaatattggtgcgagttgtggtgaaagagtaaacaggatgcatatagttccaacaatctgaaagcataaaaataccgagtattcttagagggacattaagcaaaatgaatccaacagaaaattgcaggaacatgcaaaaataagatcaaaggcagtggacaaggaatgcaagtccaatgacgtagatcagtgatcatcttcagtacacaattgtttttatatgaggaataagattggacttcattctttttcaccttattttttgcttaacttatcttatcttatcttgttttcctctgaactttcataactttcttaattttttctgaacttttccttttttccttaattaatcttctcaacttttctcattttctctgaacttatcttaactttttagaacttttcctgttcttttagaaaataagcaaaaataaggtgaatacaacagacccttagtcttcaatcacgaccagagaatatatttgctaacactacatttttctacttttcctccattataacttgtaaggaagggattgaaggtagctcactatccatttcaaaaaatgctagctacgcatactacaccttaagcataaagttcactcctgtttaacgagagtagcttgcctcagagagtgctctgaatcccctgtcccttgaaacattttcactgacaatgtctttaacagaacccagatcagaggtcaacaatccagtcaattcaccaacctgcaaaactaagaaccaaaatgttgaagttgagagggaaaaaaacatacaattaaaaaaacaacttatacaatacatgaagggtataaactgagagaatagatgtccatgaaacatgtgaacaatctaactcatagtccattgccgagatctcagggcatataaaaagtattgacagaaatatagaacacatgtgatcccaaacattaaaatgtgagataattgacccaagatcagctatatctgacagaaggagaaacgaaaacacacatcagttataatcatccaatgcacccttgtgctcaaaccatcagaagatgatcttaacatttaacaagacgtcaaaacatatttaggcgaagaactactcactagcatccagcacaaaatgttgcctcagcagtattaaaagataatagaaaatagaaataaaatagataaccaataacgttttaaaatggatccgcatatcccagaaaaagaatggtagtcttacttctgctttacaaccagctgattccaaaagtctagcaaagaagaagaatttggttataaggaagagttctcaactctctgtctctgtagacaaacggatagcattctatctaagtgccgccaaagtcactgaaaacaatgattgttgacaaacgctgacaatgaaatgctaagcgcatttgtattgaggataattaaattatgaaaaactaaagcaataagcactttataatctaaaaattcagctttccgaagagccaattaattttcattttcgctagtgatattgaatttactgtgaaatactcactccatagtaaatataaattgatgcatagaaaattggcacgaaggtgaagagtgttaaagtcaagagagaaaagtgggcgggtggttgggtgcgaggccaaaagtggaaggataagcttattaaactcgatatgtgagattcaatatgggatatcccatgaggcatgtataacatttagtgtgggaattgtttaagaagaagcacaaagacacacaaaatctcgacaaaaactacaagttgacacagctatagcatccaatcatcactacaatccatggcagaaacgatgattaaaaatctcccacagccatccaaaactttacgtgcaaagaagcctacagctccagagattgacaagaatataaaatatacacagtaccttgtagcggtcgaaaaactccacctgtttggaacaaaacaaaggcaataaagttagaattattgcaactaacaagttactacagtcttaaaataatgttactaatttcagagcagaaatagatcatgaattctaaaaacataaaagacaaactgctctaaaattatgtgttttgcggacaatgctactgcaaaaaagcaaaatgttaaagagtataagactgctttttcaggcatttaacattatctatggtggtcaaaaaggtaagaatacttcctgccattatgtagtatatgagtttgccaagtatggcagtgcggggccattgtccattttagtgctaacctcaaaataacccaagggtgagttcggattgaaggtaacatgttaagggtggtaaattggtaatagaagaagaaataaagagaactaggtgggtgaaggtggtgaaagatggaaatatgtaaagagtgtgacagtgtgtaaggaggggggaattactacactcattttgggggtcataaatacccaccaacctcctagggtaatacattaccctagataataaaatgaggttaatagtttccccttgcatctccccctccttacactgtctacatcatctatcctacttccacctaaagtcgtcttcattttcttcattttatctacattaccccccttacaacatctgtattactaacaaggttgcttgcccttttcactctctctcctccatatgtgcttgtgttgcaacgtctggagctgcccaaatttgggggtgattagaaagctaggcaccttccgaaaagataaaccaattggggaagccatgtcgatgtggggttggcagataataattattttatatttggatgggagagaggaaaaaaagtggggcaaagaaaaattaggaaagagatgttgttgagcaagctaagcattgagtaaaaacaaaaatggggacggcaaggaacgaagttagtgttaagtgaggtagaggaaagagagaatgaggtcgagggaggaaaggagagaacaaatacggccttgccttgcaacgtgggtgctcttaatacattaacccgatccaagcatcccctgagtatcaactatgcctaaatccagagcataagcaacatatggcatccatattggcaaggtcgtgaaatcttcaatgtaaacccccgcctctctttttcgtttgctgagaacttcatttccccaattcatctctcttctgcataatagaattgaattgcctaaacatgaagattgtcctaactaagcaatgataattatacctgcagctatactcactacagattataatagcaattctcgatgcacatatcatatgttagaaagactaccttaattccttggggggacggatatgtactagtgcgcttaagagtgtaaaacaacaaattcagttatgctgttccatactagctgcaagtagcatgatatccaataacagctctattgaactaaccctcttttgccaccaacatattgcatttttgttacccctaagattttgtttactgaagtcctatatgtatacatgacccaattgcttcgctgtctagttagttgcaacaactagtaagcttacatagcatggaaagtcatagtgcctgatttctatcaaatgagttagaatatgcaatgctaccttttgaatcagcatcctcctgaaaatttgagctcttaaaacagacataaccttctcccaaattttgttcatgtttatgacaaatatcacggtgaaaatgggctccagcgcatatacaactgcaattctgctcattattttccacaaaggctcaggtactgttcctgaaagtacctcaaaaaacctccctgcataataccaacatatagtggcagataagagactagataagagcaaaaaccaaagtcaataaagtaaagtgaagtaaaaatcaactctctatattgaggcacccaaatagaagggagtagctaatgtgcacccatcaacattgccctgggtcagaaaagccaaatccccagtgaagcaccctaagctattgggtatcaactgctacagtgctcttcatatcatttgatctgaaaatggagagcatgttactcctacaaattacatataaaacccactctcagccatcttctttacagcaccatggcacccaggaggtttgggagctgagattgcaaggagatgaaactcaataggaatgttaagttagacagtggccagaaagtaataaaagttctctttctcataacaaggaaactctgctacaagaatggagtgctctctacactagtgatggtttaccctccagaggtgacgttactcctataggctataacaaaagatgggaaatctactagaggagattagaaattggtgtgtgcagtattcactaatagaatacatgtgatggactgctggggaaatgtccaacaacagcttctatagataagaataccacaaagaagatggattgccgtgctaaaacacatcttttgtacagctatggtgaatattttgtgattaattttcagtcaatctacaaaaggaacgagataaagtcaaacattcagcccctaatcgataacgacaagcctatgatcagtaaatagtggacacctgattttgacagcatagaaactccaagtaatacccttgtgagtgaggttttccaagcctgcccatattgcgtaatgattccctatagagggatttctagtgatgccgaagttccattgtttgctattggtacagaacagaagccaacatcgtctttgcttgtgctcctttacagtcaatgtcactcaaccattccctgcaaaggtgctggggcaagatccttacagtcaagaatttgggaaagttgttcgactgactccaaagctgctattctgcagttttaggaaaatggtggaacatgattgctgaatttagcttcaagtaaaacatcaagggcattgtggaacagtaaaaataatgagtggtttcctagggcaggttatgagtctatggtgaagaaatgtcctcccctcgaatattagaataaggaaaactttctcgggcaatcctcaagccaagcaaacagtcatatcaacctcgtaaatcgtgagtttataaataacccttgggttccagttacctctttcaattaaccatccttgtctctcataattcaatgttgtgagtttgtgacctactcttccttcaatgtattgtatacagtaagctaataacttgtcatttcgataattagaccactcattactatcaaagttacattaccattgcaggtaatgcaggtttgttgagggaacccccctcaattattcgaaaaacgacagggttaatttgagcattatgcctcgcctcggcctcgggttacttcccttaagataaacggtcaataaggaagcataacagtttctctgtgcctttgcttcctgaatctcatagtagtactaaattttatcaaaatccaacaaattcaattgagctacttcctccattctataataattgcaacacaactcattctaagacctctgtgataggagaagatagagataagataataacaaacaaagaaatgttgcaattaatatgaaacttccacatacagaaacgttgcaattaaaaaagaacggaggaagtaatcgataatcacaggtacaaaaacaaaccaaaatttcaacttcatcaaaatccagaaaatgaaataaagtattcttagaaaaattggatgatacctgaaaataaaggcatagagagagtacacgtggtaccaccaacaagagcagaaatgcaaagagcaagacgccatttttgttccatcaataaactcaagaaaattccccaattaatcgcatcctttgattcaactttctctgccctaaaattttcgacgttgggatccgggtcggtaaccgagtaatccgaagcgggtccgggtacgtaagctggtgaggcccacttctgcctcgggattgagaatcggagtcgggtggtgcggtggaggtgacatgaggagagagaaaatggcgggaagtgagattggatttgacggttataagaagggatgtaagtgcgcgtcagagttggggaaaggagagagattgccgccattggtgattgcagataactctgcgtaacaagactatcagtgatgaacaatgtctgaattatcgagctcatattaagactttgtttgtttgggcgtaaaacattttcagtataataattttcatgaaaaatacaattttaaaattagtttctgttgtttggtttcatgtaagaaaaatgatgaaatgaaaggaaaaataaaagagaaagtagtgagaggaatgtacaaaagagataaggaaaagagttttccctttcttttgaagggaaaatggtttttcatcattgtgagagtaattttaccctaagaaaaaatggttttacactcttttgccaaccaaacaatgtaaaactgaaaatagaggaaaatagttttccaggaaaacaatttacactctaccaaacggagcctaagtgacaattttgtaatcaaattactaataaagcttagatggtgtacactgcactagtatatagaagatagaacatggtgtgtatatgtacatgaataataaacttgaggtttgtttgaaaatgatgatccacttgaggtttgtttagcagatgcctctctctttttagcgtttgtttcctttaaagtaacttcacttgacttggccattagaattatccatcacataattcggatagaaatgaaagaatttggcttacgcctcgctctaatttaggagggacaaccctccacttttcccattcttgttccgtcttcttggctgctactcctgataaatggataaacaagactgactatctcgagatcgctggataataatttctccctcacatattactaaatgtcatgtgcaacatattgtataaactgatttgaatttcattccaaatgattccacattttcatattaactattgcttagaatagaaacaccatgttaattgaaaaatggaaacacatttgccaaccaagtttttaagatattgactaattcttctttcttcgctttttttctaactggaccctgtttggttgtttccaaacattgctaacttagaacttgtgcaacaaatcgatatagagcatcggggatgaataaataagcaactccaaatatgtagcaccaccacaaacggggtaggtcgagttaatagtaatgtgagagaagagaggtaagttgatgggtccaagtgaaactaagattttaagattgaaattgtcacttctccattttcttactacatagacgggctagaatacaattcgaaaaatcatactacaaaacttgctatacataaatggaatcgagacaggatcaaaatggaatcaagaaattcatcatggacttcaccgggatacaacaaagtcaacagaatctgtgataaatggctcatgggggccatcacgaatactcttcaagacatatcgtttcaaaaggaatgaaggagtccaacttacactgcataattgcataataatcgagcatttcctatgtaacatgcaatataaagggggaaatcgtggtgaacaagatattggtacaatacaataaatggttccactaatttggataacattctcacttgtaaccaacaacaagttaacataccggtatagtttgctacactcgagcaatgttgtaaaagatttatggccttctcaagtgccacatgcagagaacacaatgcctggattcttgacctactacgtgggggtgcttgcttctagagcaggaaagatattcaacactttacgaatatcttggataaaatcttgcacaatcctccatgtaactcgcaaaagaaacaatatttgtaatttcaactggaagcaagagatcaattcatacaagaaaattcttgtagacgtagcaaaaaagaaatttagaaaacaaatatcaaacaaagatgaaaattcaaaataagttcaactttcttctttagggcatgaatttagacaaagaacaagtacaatcagtacaagcaatcggtctattcacccattccatctcgagaccatgataaaagttagtaggcatctccggttttctgatgagctcaatatcattagtcgtcttgaaatagattaattaacccacaaagaatattcctgaacaattattggttccttcgcaaagggtaacaactaataaacctacacttttcaaccgccataaccatctaaagaaccaccatatccagttgaggatcgaggtacctatgcgagcatattgccatcacaaccatttgagataccattataacacacacccatcctagatacggccacacgccgcaactatccaatgtaccaccacaaccactataaaaacatagaataggacactaatatacctccctcggatcgacatataggttcccgaacacaactattaaacaacaattcacaggtgagaatgcaataatctaacatttaaaaagaacaagaaaaagaagcaagatgaacaatgaatacctgcagacttatgtgttgcccaatgagaaagattcattatcaacagactcatataatgcttaggaaattcaaaagtgtccttgacttgtaaggacggcgtacttctacctagtcatcttctcgtgtcggtgaagtctagcaacaaatcaagcgcgcatgatcctctctccactctttgcagccttctccgatctacacggtgtaatgttgctgaattgtgtcgatatctaatcctttaagtttcacaatagactcaacgtggcctttcaaagtgtgcaactccctcactgcattcatacattatatggaatcatttatatctggataattcatgaaacaattatcatactacgcatgtcggtgctactctgctagataaattattagatgtttctccataacacaagagggaaaatagaagaaatcttgtggtttacaatcaagattaggtaaagtggcggatgttgataaaattgattacgtaggaatcaataatgttaaatgtcaatcaacttcataactttatgcatttgcgtatacctttttagaatatagttcatccaatacaaagctacaacaaaccttggttttatatgatatgaagcctttattgcataacttagcatgattttatcaatccatgtgatttcacaatcaaaggcgactcttgaatcaataaaatcataatggtagtaattttcttcatgcaaacataaagggttaggtcttacctagaaacttcatccctcctctatgcttgttcaagaatctcggagagttccctgtaattcttgctctcattgaaaaaggtggtggtaatctgcaggttgaagaacgtgcgggcttctttgttcggtcgcccattgtgcttctttctcttctcttccgtagtccttcttagtggtaaaagcagtctaagcaagacaaagaaaccaatccagaatcgtagcaaaaccaataaagaaacttaaattgtttttccgactctaacaaagcaatattaaccttattgtccgaaggttgttccaaacccttccactcaagcacatagcgaataatgaatttcggaacatcaagggatatgtaagtgaccggatcggtaaacccatacaacaagagcccatccccatctcatagctttgatccttgcaaagcgaaaattggcatagacagactatgagagccgcaatttgttgagtgtagcacaccaatatgttattaacgtcgaaaaagcttttaagcaaagcaaaggccgaaaacatgtcgataatataaaaaatcccgatttactactactttgaaattgaaacgtccaaacatgtgtacaacaacgtcctaaaactaatgtcaacaacgctatattcatctaataaacaatcaataggtaaataaagtaaaataaacttaaagacacaagacaaagatgaatatttgatggaaaaacaacatatatatattgcatctcgagtttgctctctacctactatgaacattacttggaatacccactccccacggtggtagcctattcgagatgcaatgagttccataactcttttccaccaaccaggaatgagatagcaaaccaaaacaactatataacgcaaatcagtttaattaaatcaaaatttttacatcaatacacacgagatagcaacacaaagaacaatacaacacaagtcggcaaacaacaggaaaaaacgaaaaattagagcaaaattgaaaaaagaacggaataaatttgagtaatacctgagccaataaattccaggaacacttggatgattgaaaaaatcgaatcaccgataatttaataaagcataggtcacagagcattaggtcgaatcgcaattgatgcaatcgaaggaagtgcaaagaccattgtaggaatttcccaattaaatggcaaaattacatcaggactaaccctaacaagataaattgacagaattagaaacaaaacaatcaaaactcacactcgaatacaaaccctaatatgacagaacacaacatttgacgaacatgattatcgaagaatacaataaacaccgaaacttacaatgaatttgggacaaattcttagtgattcgagctcgaaaattttctcgaacgattctcccgaaatttcggaaaagagaagcaaatgagcggttcgccggaaaaccgtatcacaaaggaccaaaaggttagaggtggaaagggaagggaagaaataagggaagaggcgatgaagatgtggtatggaaagaggacagaggtgaaagaagagggaagaaattaggttagagaagatgaacgattgagaggaaagagatgacgagaagaacatcagaaggcaactaagcaaagcaatggcaaaacagccatttcactgtaactttgggtggagaagaaagggcaaaacagacaatgaactgttactaagctacagtagttagaagttcccactttttaatgggtaatggatgaataataaaccaaatgaacttatgtatatctctagtttttttttattcggtaatctaccggcttaaacaggttcaaccctaagggggtaagaaagggatcctaatcaataaggaaacttccaaagcctggaaactggagatttacaccaaaaaaaaacaaatatccacacaaatatcccaaaaattgggatgatgagagtagaactctcgaccataaggttaggaggtgggagctccaactattggactcctatgattcttatatacatctcttgttgaaaaagtgaataaattcaaaatctataatgaagaaagagaaacaaaagatgcaagagaattctagagagagaataaagaaaaaccaaaatccttacccccaatcggaattttcaaatccccccccccattgcaagctcctcccttgggaaatccaattatctaacaaaatcttttgctcttccaaatccccctctcctaattctgacccccgtagccttggttcacgttttttcgaaataatttcctctccttgcccctaccaatttcggactgttaataagaaacaaagcattaaagacaaattactaaaaggtaattatggcatctaatggtgaagagagtgatccgagttgttcttgagatccaatgaaatagtaataattatttagatttttttagggctatctaattacttgttagtaattaacaagcaacctttgctggccaatcggagcaaaatatgtcattcttctcatctctactgcattgatatcttctgcccaaggaagtatcttttccccaagttttttcaatcgattttgtttttattaagtggttacttgtttgtgttaaattttctaaattctgctattttctcttagcgggtcattgtatttggggttttcttttcatcatatgggctttctttatctctctcctcattttcgcgtcagctccttcgcgtggtcaccaaggcccttcaacttcttcccttaatgtggttgttctcctttgctactaccttctctccttaagtactctctatataaataaccctctcttcagttactccatcctcactcacttcattgtcttacaatcacctacttgtcttctctcaacccctcttgtgttcttttccatcctcatgtctgatatcccaccctctcccaactacgtaaataaatgtcctcaagtccgatagctctcatgatcccatttctccttacccgacctttcccaattcaactgccactgtggataacaatactagtccgtcaaatcccccaaccacccctagctctccaaacatggttggtcacggtaattgtccatctcccactcccactgaatataggatcctaagtcctactctctcaaacattccaactcccccggtgtcaatgtagtttccccgaccttcgaggattctgaagtagccctctataagtcatcttgtctccttgttaagatgtggggggaaccaattcccacggttgccgtcatcaatagggccgtagagactggacctttatccatggtgagttctctattcgacatatctctaatggttggttcttaatcaaaatcactaaccccctcgacaagtatgaagtgttggagaagagacattggtttgtccaaggtctgaacttcgtgcttatcctttgaaaatccttctttaaaccattcttcactaacatcacacatgttcatcaatgggttaaaatccatttccttccaaacgaacattggtcttggcctcacttagccacccttactcaaaacataggtcaccttatcaagcttgacaaattcactctccaaaataatgaaaaggtcatctttgttagagtttatttaaacatcaacatcaccaaactgattccgtaggtccatcactgtgacttccgcctatgattctctggatttttcctttcttatgaaggtgtccacgaggtttgtcctctttgtggatgtaaagatcacatgctctcccaatgccctaagaaccggcttctgtttggagcttgttgttcaagcttgaggctaacaacctcgagccccctccctcgcttgctaacaagcctagtgactagttctttgtgaagcagcaatgtcatagtaagccttgatttgcttattgcaccaccttcaaaggtaggcgtatcccggcttcaacctccaaccctcctcaagagaacactagcctcacttgtaatgagattcttcttaatcaatcctctcctactcacctcatggataatatctccacctccaatactttcgctactttgaacgaatttcaaatcaacaacgatgatagtgtgcaacttaatctacctattacgagccctattcatgataatgagatgattaagactaatatggacccttcgaaagatgacattgatgaagccttccttcaagctctaagtatcatccaccacaatccccaccttcagtttaatgcagatatgacataaattctgtctaatccgttgagccctacccactccaactccggcgatggtcaaaaaagaggttccctctactcctaactagttcatgattggtgtccttgtaatgaatttttttgttatacttatgagacccttcccattagttatcttcttcttgtatggctattttattttcctgtttttttcttctttttaagttttcttatggtatgagttaggtctcatatttattttgcttcagttttcatgaatgtaatgattaatcttaggggaaagaatgttttcttttgatcagttttcatgaatgtttccatattttgttttgttcagggtcccattaatgtttaattttttaatcgtgatattttaaatgaaccgtcgtaataggccactgggtttttctttctcttcttcctgcctctggtcttttgtcctcgttgttaattgtccccctccaactccttttcttcaaacgttcttggatctacgtgtgtccctcaactcacccatttctttcttagttatttcaggttgactacggacttgggcctaggccaaaaccggccacaactccactggtgtcttcacattacaaaatgaaggttttttgggccctttgattttaatcaa

SEQ ID NO: 55 - DNA, 599002 bp, Beta vulgaris
  misc_feature (513514)..(513613): n is a, c, g, or t
aatattggaaagaaagccagttctcaagatgagggcgcttcaagcgttcctctctgcatggagaatatagcagcaaatgtactgacgtctcttagttttgcattcactacctgcattctggtaactttcttgacttatcctgcattattctggattttctttgtttaaaattcgattatatattatagtgtgaactgggaatagaggggagacttttttttcattagtgggcatggtcaagctgctttgatttatatatttttctatgttgttgtcgtctctttttctagcatgcagctttcgtctgcacgacatatgcagcttcatagtgtagtattcttggtcagtggtcttatttacttgtttatttctcatagcatgaagtcatttggtggacttgtttctaggttcgggtgtctttgtatcttcatcatagaggttgctttctgacctcttctgacataaaatgaatgcattgtactgtatgtgaataaacccctagacaattgttttgaaaagtaggactgcgttattgttctttggttcaagtcaattaaggttgtttcgtgtatttccttcatgctttgcgcctttacgcttagcttgctagatatcgcagctctgaattataacctcttcttttgtgtttttttaaaagatatttgagggagacatcaacttccttagtcctgtaatggaatcagcagatgaactgtatgcagcagcagctagtcttggcacttatttacagatcttctgttccaattcatttgagctgactgaagaaattatattgaattacattgggcattctgggaacatgtataaagggttactttctcgagttcctgaatcagagacactcgctgaatcattcctcactatgttcccttctattaatccactctcagcacatgcaattatcactagtggatgcgtgctcttggagttccttgagttgacagctgaagggagggtccaaatactcagaaaatatcatgtacttgatgaaagtgttaatcttttctctgccttgtgcaaatacggagaacgggaagaatccaagtctggagtgaccgactgttcttcctcggtatcttctcctcctgattcaggaaattttattggaagagtcaagtcagaaaatagaaaaagaaaatttgtttcaggttcctgtgatgctatgtatgacttcagatgttcaataccatccaacaactatgtagatggtgggttgatggatcagggagtgttgaagccatcgaaatcaaaggtctctggaagtcctagtaaatgtctacaagataagctgcccgacttcatgttggatgatcaactgtttcgtaatggagatgcaccagatactaccatatatatggatgcttctacaccatggcatgaaacaaatatcaccaaggcaccaaaaatttcccaaatgaaggatgattttgttagatctaccttacttgtgaatgatggattttccagtctacagaaatcaggtagcacagttaaaaactcacgagaagaaaaatcaatggacattttccaggatctgcgtgaagattttgctggtgaagttgtagatattttcgacaattctttttttgatggggactttcaagtagatggaacaactgtgaagtcctctacaatggtctctaagactgtaaaagatcatgctcccacatatcataggactgccagaagattatcatttagtagcagcagtggtccggacatcccaatggctgatgcgatggatacaagttgtgggatagaagataatggacagttgagggcagataatttttttagtggggtagaatataactggagcaacatagactttgttgcccaagagcaacgtgaggggactggtagaagtatactggaaaaatccatgcaaaatgcaagtgaccaattatcagaaggaaagaatgtgccttcctacggggaaacaccgctctcgaaagctattctttcagggcaactgcgacaaggttcaccttggacaatagagtttctgaaccgtattaaggaaaagaggaggttacgtcagcagagccagccatgtacttctgttccacgcactggttatcatgggaaagtcacaaaagccacaaagagaagaagcccatcaattcttgaatattacaaataccagagtaacagcacgcctagaaagttagctgagcagaaaaaggacaagaagcatgctcagctgcaaaatgagaagccttcaggattttacccaacttggactccaattgacaaaagagcaagacgggtatgttttgtcgtattactggcttttttttttccttcattttcctcttctgaaaatctaatttcatgaattgcagagtctatcttatgcaacaaatggaactggaagccaaactaagcttgtttggagtgataacaccacttgttgtcaggacagaaaattttcaggtcgagtatgagatatctgaagagtttctaatcatgacagtgtgtttagggagcatcatacattgattgtaagtaaaagactacaggtttgtcttgaaccttctgtaattaaatgagatttagagaaactacctattaattagattaggcattgtttgtggaaaggtttatcctaaacttcaacaaaccagaaatgtttgcaaaagttctacatacacgagaggataggagctacatttcagtgcttcatctgtaacttgtttgcatctgcatcaccctcgtaccaatatatcaggtttttaatgctccagctagatgtttgacaaagagacctaatcttatttgtttaatatctaacatttggaaaatgatcaatagactaggagtctatagggggaaagtaatattgactatctgcttatgcatgtgatcttagtttctgtttttcgaagagtgcatggtggtatacatgcatgtcatgattgacatccaatacaatgtaaactcattaacgtttgcaatgactttcaatctgaaatttttgtaaaagaatttgtgctatgcctaaatttttcgcattcattaggcaacagttacatgcttgtcagttgtgttatagagtaatttggatgttatgttcaacaattgcaagcacagatcaacttatttccatgatgatgcaagtttctgagagtatctttttttctttggcaaaagcctatcttgatttaatttttccataaattatgttaaggaaaatttgtcaataaataccatactttggacactcttttgaaataaatacataggttgtctaaaatttgatataaataccaagggtcactaattttttcggaatcattaccacttaacggaatcttgcaaaacacattaattttgctccgttagtggcacatgaaattacgattttacccttcctccaccatcatcaccgccctaccacatgcgacaaccatgctttccaccgttgccaccaccatcacccctacttacccaaaaccacaacagactacaaaaccaccaccaccaccacctccactcactcaaagtcatcccaccccaacaccctaaccaagtacgaaactaccatcacctccacctatcaaaaaatcaacccaccacacgatactaaccaactacaaaaccaccacaccctcataatggtggttaggagagagaaaaggatcgcaagggtagtgagtttcgtggggttttagtggtcgtggtggtggaggagattaatggaaggtaagaaggtagtttcacagcatgccactaacgtagcaaaactaacggtttttcgaaaatctatgaagtggtagtgattccaaaaataatagcagatgttgctatttgtataaaatttcaaacaacctaggtatttatttcaaagaagtgctcaaatgtggaatttattaacaaaatttccttatgttaataggcttataaactttgaatatgcttgctgaagatatgataatcatgataggactgaatatataatcaaatactaacttaactatttccagctgccagctccattcacacagggtatggcagatataggataggcctgatagggcattgtattttttgttggttattggacagtttttggctcttccaggacacttatttacttgattatttatctgatttccaagtgggccaagaggcatataataaacttaatatttgataaaagaatgttaataatgaaagtggttttgcttcttggcgcactatcgtaatcatcatatctgttaattgttttgatacacagagatgggtgtttcttcttcatcttttatcctaaattctatcaggtattgaatagttacttcttttgaccattcctcaagttgcgtatggtcattacaagttgttgcctttcaccttcaacctctgcaaactttaggctcacatctgaatatttctcttgcatttctcttagctcatcttccattgttttgttcttatctttcagtaatgccacctctgttagtaaatcactggcttgagaatcagtgactttcttctctgtgcatgtgtctcttctgcacgagaaattttccagcataagcagaagttccatgtcaactaaaaagtaaaacaaagtatgaattagaaaagtttgtgctctgcacctttcccctgatgttttgctggctccattttgcagtgacttggctgaagttgctgactgctgtgattttttccctgaaatttttctatcttccaccttgctaccactctcaggagatattccactgggtctgactgcctgtagattgacaatatgtttcttaattttagcttcaaatgtattactgcctccgtttctttttactcgctacacttctcatttcacggactcctaggcaatttttggagaagagagaggtagagagtaaaaagaaaagggacccatgtgggaggagagagatagagagagtttattgcccaaaaaagaagtgtagcaagtaatgtgaaacttcccataatggaaagtgtagcgagtaaaaagaaacggaggaagtattagtgatgcttctcttgcacttgaaggagcaccataacttttcatggaagaatataaagccaaaggcacaaaaattgtaaaaacagaacgaaaatgaaaaaaaagcaaagataccatggtacacgactttctagtcttagaacgactttcatttgggggagaatatgaagaatgcttttgggactctaagcaagggatggaggtctaattgaatttagcaaaagaaccaaatgcaaaagtcattgaactcttcgataggcttgagtctctgatgatctagtcgagtcaagtgggttggagactggataaccctgtaattatatcttattgtttgaacctgagcttgtatatccattctcagtgttgcaagtcacttaatgtaatagtgttagctttggattaatggaagatactgagatttggaaaaacagccatctattgacttactagcttgaaaacttgtagatagtacagcctcatacctaaggttaacagaggacatgagtctcagcctctcaggcatggaagtcatatgttgatatgtggtaatcaactctattaatgtacatatcatgacgtgcacttttgcgttatggtatttgcttctgtgataagtaatttctaggggaatggaaaaggaaagggcttgcacttatttcttgtttatttgtgaagaagaaagttatgctacagaataactctgcgtcttttatttctctcttttttttatttacaacagactctaatgcaacacttcatatctatataactgcaagtaatgtgttttgagcctaaaattttgggtttagtgaagctttctgggaatctttcttttgtattataagacacctaagtacctgatacttcctttgcagaatgatggttgagctctttaacatgatcttttgtcggaagttaaaaccagtagcactatggattagtaatcattgcctctaagaggcttctggctgggcagggaaagaggtcggggggaggggatgcagaatgacggtagagttctctaacatgatgttttgtcagaactcaagtttcggtaccactatgaattggtaacccattgcttctaagaggctggggagcaggagggggagggtttcaggtgtacacacagacttactcttcctaaaaggtttgttttcaggaccctaaataagacagctgtcactatcaatgagaaataacagacagttcagtggacatctgatgtagtccattgtatggtaacatgaaaactttgcgaataaaggcactggtaactggtaagaggtaatagtgctgcaatgggatgtgtgatatcttgatatctaataaataaggaactaggacataaaaatatcaccttgagctgctttattttctccttaagagccgatacatccttggagctgctatccttgaacttctcaagatgtgctatttcatgatctttcttctgcagattttccttctgcctggctacttgctttttgaggttctcattatccaactttatatcagacaatcgggttttcaattcattgtgctgaacttggagtttttccaattgtaattgtacgccagccatagcatcttccttgtctttcgaggatcttaggactttgagctcctcttgtgcttgatttatctctgtcctcgccatggtatattttgtctctagctcttccctgtctgtctttgtttcttgaaaagacttcttcgtctcatcaagtagtgtcttcatttcttcaatcttgtttgtgaagtcataattgtcttctgtaagcctttctacttccatcctaagtgcttgattctcatttgacaaggcttcacatttttcctctactttctttctgctatacttaagctccacagtctcatctttgtgtgcaagtactagttgcgcaagtttgttctctttatcttttaattctgttgaaagccttcccacttcagctgtatatcgatcttgtaccaactgaagttccttgttagctttctcaagatgttcttcgagagtagttgtatgaaggcgtagctccctagcctcagcttctgcctttgcagtcaaatcttcgttttccttgaactttgtttctaattcttccgaaagttctcggaactcttcttgtagtctctgggctgcagaagcattatctagttttgtccttctcaaggtgtcttctgcatgaagggctctttgctcgagctcatctttggcatcagtcatttctttgagctcatcttcaaattctacttcctgtttttccagttcatacttcaaattgtttacttgcgtttcaaggtcgtgaatcacatctgaagattcacagaattcttctgcttgcttctgaattactttctccaaccttgctatctgacattcaagttcttccactttccgcatattatgtgtgcactctctttcctttttaatcagctctagttgtttctgattaaactttgaagagagatcatcattatccttttttgcaatctcacaatctttagaaaactgtttgatctgcttttgaagggttttattctcttccacatggtcttccaattcaccttgcaggttttcgatcagttgttgcaacaaatgtacttctttagaatctctgtttgggcttggagcttcttctacttctctgtcaccaaacagttcaaattcagattttggttcctgaaatccttcggatgctctgtcgcttttcaattttttggtaagatcagccaactcagtctctttcttacctaacttttcttcaaggtccctcaccacaagaattaattctgaatttgaatcttgcgtccttcttagttgtgaacgaagagccctattcaaatcctttgtgtggactaggccttcttcaacttcattctggcgatgcctcgatttcttaccctcagttctcgtttcctttggatgttcagttccattttctcgattttgctctgatctgattttttcagttcctcttctgaatgcatctctttcctcttttagtctaaccactttccctgataattcttgtgccctttttgtttccttcacagcttgcctccttaatgacagtagctctatgtcagttacctctgcctgtctcttcaaagtaaaaatctctctttggagctgttcaacgagactcttaggaggttcttgctcttgttctcttagaaaattttctttagtatcctccacgtagttggtaatatcatcctctgaactccaatcgagcgttatgggctctcttgtttgatgttcgttgtgtgcaggactaggggttctaaatacaggtttgttagtgtaggctgattggtcactgctggtctcctgatgtgctctactttctttctgttcaaataaagaatttaaggtgtttccattccttgagttcctttcctcattgtctagagaatttgtgttgttgtaatcatcctgccatgtgagagagtgattaacttgagaaaggacatcaggtggtcttgtaatttcattctggaaattttctatcttggactatgtcataaaacggatatttagacatcaggtgacatacaagttgaagattagtagatcaaagactttactttgtgggcaacaaaattcatgtctccttctgatcgagagtttctgtcatgactttggaagctgccttcatcgatatttgatgctccagtgtcttcaatatccatctgaagctccctgagaataaagttagatgtatataatcatcttaatcaaatttctggcatgacagaaggctgggagcgcaacacttgatatgcttttgacattacctttgatcatcagctccttgcatattctgaatcatgacctgttttaaagtaattaccaattagagttaccttaggattacaattgatcagaaatataatgctgggaggctgtataatgtagatggtgcaaatatggtgtattcatctttaattagcagaaattctaatcttctcttctaaacgttaaagctatcttacttgttcacttcactttagtcctaagctttcatctctgatataagcaatgacacttagaactaccacattacagcaaaagtagatgcaaagagggtaactttctgcttacttgtcatatcggctgagaattctatacttaaaattatgcgaaatagggacaatattttcactctttatttctgtttcttttcgagttaatcggtctggggaaggactgatcagttgaatgctaagctaaataaggcacgaaatgtagagtgctcacatgtaaaattgctccagtgtttgaggacttaatcggcaaggagattgtggagggtgttgttgcctcgacatagtctgcaaggttaacaaaaacttctcccaagaaaccagcttttgatgatccctggcaatgttcaacagaagaagtttttaatgcatattgaagaaaaagccacaaatgacaagaacgcagaatattttcctaccgtggaaattataagctggtaaattttgtcgtgaagcttccctgtttttgtctcccttgtgaattttactgtttcatatactggattttcccatgtacagattccatcttgaaccgcagcttttcccaatcgaactgttggttggccaacatccactggaaccaaagatatcataagctttgatttggaacctggcacctgagaatgcagaagtaaaacaatcaataatccgggtaaatcatatcttgaaatccctcttatctttgatcacattatatctgtcgtttgcaagtgtaaaatcataatataaacgattaattgttgatattgttcaaccataggaaggggaaaaaagaaattgatgcaccaatgtcgtacaattctaatgtaatgtaatttcccaactcgagcccgttgaaataacagcacaaacagttcataatttgaaatcatatgcaagaaaattctagtggactggaaattttttcactaatgtgacttccttaaattttccccacgattcagttcggggttagattgatacctgagttgcttgaaactgtaacatgaacacaactttgatcttttcatgcctccatcgccccactttgaacatcttgggccctgaataactcaatttagaattcactcaacgaatgaagatcctgcaatattgtgtttctagttggtaattccccttgtgtttagttggtatatccccttctgtttactattctcgtacattggtagtgaagttctgatctgaagagatgtaaaggaacagagcaaatatggtatttagaaaagaatttcagagatctctttctcagtgaacttccttcctaagctacaagtttgaaaaataattgttgtttagtgaactacacaagtacacaactagtataacaaaatagaaattagttacaagttgtatatctttctgtctccccgttttttctttgttcacctttggagatctagcctttcaacttttgatatttacataattaccctttcattacattgcttgcaaaatgtggtcccacccacccaggccatttcttaagtagagtaaagtccttgaggtaaaagtattaatccaaaatgttaggtaaaaccaaaggaagccagttaccatcaggacaagaatggatatagctaaagaaagaagcttctctatcattctctgatgaaaagttggatgttggctgtgagaacagcagctggatatcacgtgagttctgatgtttatataaagtgggcacgtgatgaggagccttcctagttagattataaatatcttaagttaaatataaaaaaattagttcgattctcataaatcttacttcaataatttattatggcattttatgcagatggtctgtctagtccatgtctcagtttgcctgtggttagcatttaattatcacaatgctgcgctgttcttggagtacattaaaagatcattttgatgtatccataaaaaaccagtatagtaattcaaaatttactattctcctcttttctagaggttggcagaggatgtctattatacactactaaatactatttgatgtttgtaagagttgcacagtgttaagattataacccacacatgaattaggaatagttgtgttatattaaaaaattagagagcgaatgactaacatatagattgatgggttactctacctattagcaattggttttaagataaaacccatccaactttgtatgtggtaattttccgacgtaagcttgtctacagactcaataaaatggttttttttacttttattataaaaactatggtgttgctcaaaagtttcatgtgaagacggtggtgatctgtttatgcaagatcgtgccacctttgcagcattatgtgaaagacataagcactcagtccgttgacggaactttgatggttgagaaagcgaaaaatatgactatatcagatacttcattatctttaagacaaaacaagtagttagcactttgtaggctggtagcacatggtaacatgtctgtcatacattagtgccagatcattattcaattacaatttcttacagcctatttgaactaaaggcccaccaaggcttatcaaagagagaaagtctttaattaggttgctattatctgtttttgtctagtattttccctgtctgtgcctttattttggaaagtcactgtaatatggatacctttatgtaaggattaaaggagtatgagatgaccttacttcctctctaatactccgtcattttactttctcataaagggcaagaaagttctaaataaaaatatcacatagagcaagatcgctctcttagagaatagcatggtggatattctctactctagactcgaactcgaggtttttttagttttctcattttatagaacgatcctctttcgatccttcagttgaatttttattatctcccttatgttgacctaaccacctactcaattacattattaggttcagggcatttaatgtatttgtatattaaataacgacttaaaattattcatcggtagatattggtcttgattttaataacataggtctataactcgacttcattttataaacatttactttttgtacaatgtagattaatcaataaaatatttgatccaaggaaaatataacggggtagtatagaaaaatttgaaattcaaagaatcaaccttctaaaagtggcataattacttgggattgtccaaagttcaaatgtgatctaacgatggatgaagtagttttctttctcttttctatttaggtagtaataggcaatactcaacaggcacattcaatcctattatgagtactagagcatggattataaccaaagttaaaagcaacttttcatggtaaagagtaagtttttccgtgtgcagttgtcgacagtaattgcctatacacacaactactaataatgttgtgtagaatgtagagatagtaactagtaattatggtcctcttttagactaaatcaacgatatcataaagccatattatccattagtaatacaaaagatggtcaattggctcataatttgtcacactctccaaagcctatgttctatgataatatgatgggagatgcaaaagtttatagctttttgtgcactgaatcatactccactccactagtgtagcaacataagcatatcttcttccactatcaactggtgcccacactcctaattttttttttccttattcatgcctcatttgaattaagaaacaccttttattacttagatttacacgtccccacttaccagaaatatgttagtgctgactttaagtagtaacatctgacaacgtgctgggaacgcagctatttttatcaagtatacaactctatcattaagtacatttctctaggtaattaagacattttagaacatgttcacaactttcaaggtgtaagcctttaagggaatgtatcccttttgtgcagagaaagatgattttggcacttaattggtctttttaccactgctcacttgcagagaaagccttggtaaccaactgtttgagtccaaaaaagactcaaacactcaaaaagttacacaatggtaccattataacctggtattggtatcacattgttatcaggattggtaccaagcaaccttattttggtatcaaaattttcggacaatggtaccaatctaacctagcattggtaccaaacaacacgcgtgtgaaatttccaaggcttaaaatgaccaatttgcccccgtttgagtcctctaagagactcaaacggttggttgcctagacaaactcctcacttgcataagaaggaagtgggtttgatagagttgggccttctgctatgcaaataatatggttgtttgtttgctcataaaagatgattggaactgttgttattgatcatctacaatgtgtttgatttgcaatgatagagagaagggggaaaatggagtgtcttgcattttccttatttctttttcactaaaatatttggtttatttaaggtgaaggaatatgattttcttaaatacccttatctttgctccctctttcttattcctaattaaggggaaatgtatctcttatctcattttccccagagtgacctaactcttgcatccaattacattgttttatttttatttttttataaaaagaaacttgttaatttcttcaaatagaattaactcttgatttgattttgtttcaagaataatattgaagggtatatttgctctttttaaagtagttttgacatgggaatgcaagctgcttgtacctttgagtaggtatcaagatatgcttttgtcagctttaaacctcacaggaaggtttgaaagtaccgaaaggaagacagagagatggtttagtgtacatgtgtaatatctcatcatttgggcccagctagataaagtctataaagttgggttttggatcagttaagggaggctgagagaatcttcagtatgtctggactgtgcttgggaagttgggcctcttcccaccccatggacaaattcatgcaattttttttcttaatcaataataaaaacaacaatgcaacataaataaagatatcagtttaatggaacgggttcacaataacatattatgcattaaattccgtatgatatagtccgtttttctttgttatagtcctttttttgtgtgtgataaagtcagtttggattcacaataatatattgtgaacctggtccacccaatatgttttgattttggagagcatggtgattatatatatttttttaaaattagttttttacatcatcagtcccaatgtgattcgtgcctgaacactttctctccctctctggctctcttatatttgatccaataatctggtgtgaccctgtcttgatctgttgatcacttcccgaatatgtctccaaaacaacatactactatattagatcagcagtagcacatattattcttaatatagtagatcacaaacccgaatatgtctccgagacaagatataatttgcaacaaacttattcaacattttaagaaatcaaatgattgtggcaggcacctacgtcaaacaatccatgcatgactaatggatggagtgccaaaataatctgagggtagatctcacaagttccaacttccaagagcaggtgacatcttttttatttatttttttccataaagaaaaagaaaaccaatacatttgcttattgttttgtgttggtttacaggtaactctagcatcatcatctctttcatttaaccacgaaggataagttcatatttttatcccaaacgtggaaagatgatgttggtgctaagagcaactccgctgacatatgtggcacatgcactggcagtagtgtgcgcggtgatggtgttggtttggtgcagcagcttcagaggtggattggcctgggaatctcccaataaaagtctcatcttcaacgtaagctcttatgcaaccttcaaatttgagttattatatgtatcattttcccttctaaatttgagcgcatttgattatgagaccatacatgatataatgtatgtcgtagttggtacttatttttatagtggtgaagtatcacaagattgagattcaatttgtacaaaatattgtgagacatccttagcatcatcgtccattcacatggacatggtaatactgtaatgtaaatatttgatgatacaagcattatgggacgccacttgctttcacttagaaggacctattgagctatatggtgggttagacccaatttttgtgcccaaaaaaggggatacaaggaaaagaagaggggggaggtcaaaacggaaactttgttatgtaagtttgtggagctgatatggtagattttatcaacccatacagtatttgcttatttctttcaggaagtgtacttattgatttgaggtcgttaacctaaagactaaagtcatcataaattcataactatatgcaatgcaggtacctaaaataaaatccttagcttgttcactattcgtctattcacgtatacaatttcgtctagttcactcctgactcaattcctgacataaatattactaggataaagaatctaaaaatactgtacagactttggccctgtcacttaaagtctataacaccatcatccacaagttaatctacttcacaacattatgtgaaaattctttgtgaattttcataattagctgatctctctgaatttcgatgataaatgtacaaaaatatgttaccaacgctatatatttatatgataaagcaagcttgatgatgacaatcgttaatctgtaagtgtttgatacttcttcttttgacagattcatccggtgctgatgttgattggtttcatcatatttgggggtgaaggtaatcacttgagctgatattttgattgttcactaatgaataaacatccttagttctaattattttatgcttgttcaatttaatgtaaagtgcagcaattataagctacaaatctctgcccttgaggaaagatgtaaagaaagtgattcatctagtgctgcatgcaattgcattgattcttggaattgtcggtatttgggctggtttcaagttccactatgagagctcaatccccaacttgtacagcttgcactcttggctcggtatgggcgttattgttctatatggcctccaggtaaatccagtccagtctatatcgtccctgtttaaactgatagtcctcttgcaggcttgaaaaaattttctttgaagatcaaaagactaaatgttcaataaatatttactcattgcttatccaataatgaattgttcattactactatgagcttgctgcgttccatataagctttgtttggttaaaaggaaaacattttgaatggaattttatggaaatcagatgcttcatgcttttctactggttccttcctacttcctagcaatgttggatgacagtaagatgataaatggagggaaggagaggaggaaattgaggaacaaccatgaatagaattattattgttctggtttcctgatcatagtggctctgtatattcctgggaatgatgtaagatgcgtttctttttctgcagtggatatacggcttaggagtattcttctaccctgggggatctcctccgatgaggcgcgctttgcttccatggcatgtgctgattgggatgttcgtgtatgttttagctgttgcaaatgcagccatagggttcttggagaagctcactttcctggaggctgcaggccttgaaaaatatggttcagaggcttatcttgtcaacttcactgctattgccactatcctttatggtacctttgtttttctaacagtgtatgctaaaaaagatcaagagtgtgatgacggtttaagtagctgaacttgacaaaataaagtatcaataaggaaactttgtcaaacactacctattaattttcacttgtcaacacctaataagaattatcacaattttaatcttttatggttgtaattttttggatgtaattacctacattaatatctaggagtggctgaaggatatctcttgaaaaatgttatatatttgatactaaattttgttttgttcgtctacataaaagtacgttaagatcgtagtacctacctaaggtaatatcttggacattaattttaggccttgaacttaacatggatatattattgttacatgctatcctaaaatctccaattgttgtccaatcttttaacatatttttcaatcatacccccattagattcactctgcccctctagctcatcaaacaccaccaaacatccactagtaaaccaccatgactaacaccacatccaccttttggccaccccttgtcgggcactattgccaatctcttcatacaagaaaaatgccttcttcgttcacaacgtcaatcatagtcaagatgtcccaaaaggacgcccatgccatggttgaaacatcctagaagaacatctttgccatggttgaagtgtctttgccatgagttggttgtccttttaggacacccacttggtttgccagagataaaataaaaatggttccggtgggttgctaccatcctgcaactttcaggtgaccaaatttcggcaaacaaatgaagtacaaatggagacgtttggagattttaggcccacatttaactgctcactattctaaaagtttcggctaagcaaataatataactagtaaatttcgtgctaggagatgcactacttatagatgtactccttggattacaaagagctaaaaggtaaaggaatacataaagttgtgtaacttcaataggtagtctcatgttttaattcatagagtatcatttgagtggtttccgctaagagaaaacgaataatattttgatcatgtgttgggggtataaagtactatgtattggtgtgtattttatacaaattgtgattgaattactagtaaggagtatagcataaatattgcattttaaaaacctaaaaagtataatacaagtgcttattttgttcatcatctttgttacaatgatgattatcaacctcaaaatcaaccaaatcttttttcacaaaaacatcacatgaacaaataaaaatacaacatcctctaaatctttatgaaatcacactgaaaattttcagaaaaagatcgggtgatgctaaaatgaacacatcaactccctattcatcaccaactcaaactccatccatttcaattcaattaggtaagacttgaggcgggtggcacaggacataaacacacacgaattctaaaccttgtaggcccaagaccaatagtacttatcctaaatttaatcatgtgggccctctcataaactattccacgtagtccaatccaataaatcttatgtttcattttcctttaaattcttttttttttcgaacggccaagattgcaagtttccaaaaaaaagtttttttttttttttgaatttcataagtccaaatatcctgtgagagaagaacgataaaacccaactttattataacgactttctgagtttccatctttctattgtttagggaaaaaactaaaacgaagaagagagagaaaaagaagagagagaaagaatggcgggagagataaaggcaactccattgacgtttgtagtgcacgcgcttgcagtggcgtgtgcggtgatggtattagtttggtgtatccattttagaggtggtttggcatgggaagctaccaataaaggcctcatcttcaatgtatgttcttctttctaatttcatcttactttttttttttttttttttgacgtttggggctttttttattggcgcaaatttgttggaatattggaaaatctgtcattaattttttttttcttaaaaaaaaaagttgacttactaggtgatttgcaaatggcaattgatcatagaaagaaagtatttcccaaagtataggagtgaaatgagtattttatgatgttatttttagatgaactaaaaaaatttacattatggtaatgaaattaattaattatgttgcacagcagctaaattaaattgaattgaaataaatagtgatatgtgagaatgaaagtattgtccagaactgaattgaagtgaaaataagttgggaagaatagacccatattcaacatcataggcgattttttttttcgaattagaggaagataatgtaattgaaagtttctaattaaggaatgggtccattagttagtttcatttgcttctttctctaattctttcataagcataattgtagttggtttgggcttgatataaatgtacaagtgacaataaattaggcacatgcttctgaatttgtttctaataatgtactagtagtatgttattacagtacaactctttaaattgataggttcataattgcattgatagtttgagaaaaaatattttaggtcaacatgtttgatgggttttggaatttacacacaatatattaagacctgtaaataactaactaaataggttgttggtaagaagaatatgaatagtatacaataaaagagtttgtgcactttaaactttctaacctatcactccactgatgggtgaaaaacaaatttcaaattaatccatctgtctcataatatactattttttttatatagtttccaagataaatatttgattttttaatttcttcaattccttattaataaaaaatataaaaagttgatagtatgaaactacacatcaaggtgaatctaacaagatcccacatgaagttattaggcccggatcatgcttcaggtaagaaaaaaattcatttattaatataatactttatgataataacagtaaatacaacttagcctagtggttagaactttagtatatgtacttgaggtcttgggatcgtttcttgttttcgcatgcctttaaatatatttgtatagatgagaatatttgatcaaagattttaaagtttgaccttaataaaaaaaaatgaacattatattatgaaatggagggaatatctgatttctaatttctaatttctaatttctagacatttctttggatacattcattgagaagataagttcattttaatggagtgtatgaaaagataagacgtgccatcaatacctatcttgcaagttgcaataagagtgtaattggctgctttgattgatcttgtatcactccatctttttaattttgggtatggtgggaatacaagtgctgtcttcgacctgccttttgtctgattaatgtgaaacgtttaagtcgtggaattggtcaagcagtaaatttattaataattaacatagtagttagtagtttagtactgcttttgatttgtattttattcaatttggaagttagtgattgactctgaagctcacctttacaatgttctaatttctaacctaccttgctcgtatttgtccctccttgtagtctatgttcattttttgtggtcttgtgctttgacaatagaatgtggactataaaactatattaatgtctcgtgtctattaagcatgttatactactaacggtccgtttggtagttggtcattaatgatggtaatgaaaatgaatttgtgtgtaaatttgtgaaaaatatcattgtccattcccatggtaatgctaatttatcctaaagtgtacattttccttcttgaattttcattcccgtccaataccaccttgtaggtggtaatgagtggtaatgaaaattgtttccccttggagataaaaacataagtttagggggttgcttgtccatggagaaaaaatgcctccccatggagatttaaagggcgctttcctaataaaattacacttaagattcattcccattaccacaatttattaacgactaccaaagaggccgtaataacttgtttagtaataggtcataaataatggtaattatgatgttaattggcatgagaaattttttgtcgatatttatgacagtgctattttattttaaaatatatattttttcttaaaattttataaaaattgtcacttaaacatatggtattgagtaggaatgaaaattcacaaaaaaaatgtcatatgtttgaaaaatgggattcaattaccgtgataaagaggaaggagtttttacttgcaaattacatatgaattattgtcattaccatcatttagtattacctacttaaagagtagtaagagttagaataaataattatctcttccatcagttccatgctaaataatttcaacatttgttttcacaattcatcaaattagactttttttctgttcaaatataataaaataaagtagaatttttaatatgtactctcttatatattatttttattaaatgatgattatacatattaatgatcaaataattcagaaatgttaaagtagtagtactgtaaagtggttagtcatgctaagagcctaaaagtggttagtcatctaaggaggctgtattagtttaacatgcctaatcaaggttagtgatatatactagtgaattcattaatgaaataatgttatgattgagaatataggtaatgtggagcatatatgtgagtcactttgaattatttatttcagattggagaaatacattgaacaaatacagttcatgcataactttaatgatttacttttcttaatgtcaattgatttgtaatgggattaataatgggatttcacttcaagttttacttaattgactcgtgtttcactcttcattgcttggtgctacttgttaaacagtgtggcattactacaaattttatctacattcgagtgtatcgtgagcatggtatatctattccggggtatttttttgctcattgcttatttggaatcatccaaatgaacaaaatgtattaaaaaagagtgttttaaatgacaaaatgaacagaaattagttttacgtgtaccatgtatgatcaatgaactcgtggaattaccactcatccttaatctaatttttgttgttttgatagattcatcctgtcctgatgttgattggtttcatcatacttggaggtgaaggtaatcatgtagaataatactatgaccaatctctaacttattgtttaaccacaagttagtttttctatttttcctaatgctgattatattttaattgcagcaattgtaagctacaaatctttgccgttaaagaaagatgtgaagaaagtgattcatctagtgttgcatgctattgcactaattcttggaattgttggtatatgggctgctttcaagttccacaatgagagtgcaatccttaatttatacagcttgcactcatggcttgggattggcatcattgtcctctatggcattcaggtatatttacttcatattagtatttggcagcttattacggacattgtttgagtaacccaccgggtagactacccgctactaatagacaattaaaatattagtatttaagtctagttggattccactatcataattaccacaactttatattatggggtgggtagtctacccagtgggttagccaagttttttccgcttattacatataagtgaattacccagcaaaatgtccctaacaataagcatgtgtttccgagtgcataaattgtgttggggtaaaaaatacttgactatcacgtaaagaaaataattactattaccaagcaattcttgatataatagtaataatttgatctcgtgacttaaaacctaaaagattccaatattaaatacgctctctcgaagggaaaaaacttggttaacccaacgggtagactacccaccccataatataaagttatggtaattatgatagtgaaatccaactagacttaaatacgagtaatattttaattatctattagtagcgggtagtctacccggtgggttaaccaagcaatgtccatctcgaagggaggctcaggctcccttatcgacaaaggatacactatggcagcctggcaggggctcattcgttaggagtaaatgtcctcgtgctttaaagaaagtacttcattacgtgaaccaatttttctgttctgtggtagtcacatggaaaacttctgggctcaaattcgtgcccaacgataccaatatgggcccatgcgtttttagaacatctgggcccataataggttaaactgataaaataccaaaactctcattttgcatcatcatataggtggactgtcatcatggttgttgtcatgtgtggaattgtggttatatatctctatcttcaccttttaagaaagtctcatatcgtagttcatttcaatatattcgctcaatacaattttataacatttcttatataaaagtgtgattagcataaactaaatcttattctaaaagtaaggttgcattattgtggattttaatataaattattctcatgaagttataactttacttatcatgtagatgtgatctagtttagttggtaaagtcttaggtagatggtatctaatgtttgagatcaaatcccatctacagcgcttagctgttcattcagaccaaacaactttatttatgataaccgtctattttaccctaccaaacgtgtagtcaatggtggatcttcatgggcgcaggcccaggcgtggctctgtaggtttttttttttttttaatgaagcctaaagcattgtagtttagagcccaaaatccaacatataaaaacaagttacacaacattagaatatgttattgtggaaaaatctggccccttaacaaacctttcaaaatccgccactgcgtgtagtaattttttccggcttcctaatttggtacgatttggtgggataatcttgcagtggatatacggatttgtgatattcttctacccaggagggaactcttctttgagaagcgagtcactcccatggcatgttctctttggaatatttgtgtatggattagccgtcgcaaatgcagcaatagggtttcttgagaagcttacattccttcaaagtgctggccttgataaatttggcgcagaggcatatctcgttaacttcactgccattgccactgtattgtatggtgcctttgttttgctcacggtgcgtgctcaaaaggatcaggagtctactgaggattatggtacctattcagctatttgaaattatggaatatcatgaagaatgtcattattatttataaaatggtcatctcccttgtgtattattctaggtatctatgtatattattaaattgtatctttctaaattggaggatttgttaacttgtgatgtgaactataaatgtactcttgttggtttctatttttagattatggtggacatgatgtatgacttatgaggaccgttcatactggcttacatacattaatacagttgttgttgcaaaaagtttacgttgctaatctcaatatgtaatagactctacattcggcactgacaatcagaatcctgaattgttggggtctgacctgattggtcgtggatatactcgaaacctgtttcagaacttgttttgacactattaattctaatacaaattcatagatatgttgagttttagtggcgcatggttcataaagtttatcattattcaacagttgtataatgtggttgttaattatgaactacttttatctcattttctaatactagttttcaatttgttataagtatttataaaaaagtagatataccattagtaatttatctgattaattatgagatcatagattcatagtaaagtaaggccagaaatgaaatctcacctaatttgggttaccatcatgggcatttagtgggaatcgctccgataattagcattttaagaacaatcaaacaagaataatagattagtttaataccctattacctaatgctagagtctagcatggacctgatccacattaaaattacggttatttcactattatatccctttaaaaaaaaaaattcatcatataccctttcgactttgaaattcaccatgtaccaccgacgttttaaaaaataaattcacttgcccttaatgactaacgggtcgtaatccaattgtattttagctagccgaaacatcttaaaaaaaggggttgcattggaagaaattttggtggctttgtaacgcccaaatttgatccctccttatcccctttttaactattgcttatccacaaacttgttagccgtactggtagcttttagtggttggtgtttagctgttagctattaaagtagtggtataaaacattgatgttcggtaaaagaaggcggagtagttgtttacaagttaaaaactcaaagaaaacttaaatatgaaatttatactccattaaatactaccccaaaaactacaaattataatttttgacaaacactactaaaacactatttccaccataaaagctactcatactactacctaaccaaacactcctgtttttcataattagtgttttaacttagcttgcgacatacaggcccatagtgacctctactttgacatagcgatctttttttcataacatatattctagtggttcatgcatgtgtttatgtaacaccgcgacaattctctattttcaaaaatacttttttaatataaaacttagagaattatcaaagtattatcgtccgtgtgataatgtatcagcttattcagaattttgcaatggaaataataataaataacttttaaacgtaaaacttagtcaaccaaaaagtcaactccaaaagtcaaaccaacaaaggtcaaaagtcaacctcaaaagtaaaagtcaactagaaaatgtaaagtcaagtataaaatgataaaagtcaacacaagctctccaaattcccaaacccataattcatcatcttcaaacctgtaatcgacgatgctctattgatcccgagagattgatcaccgaatggggcatcacaggatcaaaaaggcatatacatgatcaacacatacacacaaagtacgtaatcaataaagctgagtactacatggtatatacatataaaacctaacatgatactaataattaagcaagaataaataacaataataataataataataataataataataataataataataataataataataataataataataataataataacaacaacaacaacagcaacaacatagcagactacttttactgaactaaactccataaccaataagttaattaaattagatggaatagtcaatgaaacgagttgtccaaagcaaaccagtcttcaacttagaatataaagtacgggtgcgactccatactccccctgacctaagatatcgaggaaccttttaaataaaaactagtttttaagaacgggtttttgccccgagtacttatatttttcatctattaataattcaattttgaaatgattacaccatatatcactagtggtaaatgtatcttaatttttattaatagatcatttggtcctttgaacttcacctcctgattcgtattctcgaataacaacaataagatttgattagcatcaagaataatttgtaacgctaccctattaattacgaagtagaggattctaattaacgatcatggtgagttccgaaaggaaagatggatcaagggtatgactgcaaaaaaaaaaaaatcaaacaagaaaaatcaactttatggctagagcctagaaataggcattaactgccacattactaattacaacacatatctataattttttgaaaacatgaatcactacaagatgttagattagatgataaatttttgaaaatccttacttgaggtcaggggttcgagcccaaacttcaacatatatatatttttaaaaaagtaataatcacctgacttattgttggttaaaacatatggcaacattctagtggcagattaagggtgtcacgtggcgcatacacgttatcaagcatgccttttaatatatttgtatagaaatagatagatagatagataggacatggtgatcaattcagtcccaagaaaagccatgggctaccaccatatactccaactcatactagtccaacacttcagacgtccacaagtctaaagctattgctattcacgtttcactttacataattaataatttattacttattatgactcacaaaataagataaataatataatcatcaaagaatcatagaatttcatttttatcttaggattagataaggtgatcatcaacttaattaacaactgaagattaattccaacattaaatccataaccttttatttatttgaggtcaaataagtttcaatcagattcaataaggtccaatatgttccaataaggttcaaatagtcaatgatcaataaattaaaattaaaattttaattaaagtaccactatgattattatatagtgatatatttgtattattgtctagtatatattattcatattattattagctatgttattatttaaaaaatatatataaaaagtgccactttgattatatagtattatatttgcattattctctattatttaattattcatatcactattacataattatattattattaaaaattatcatacatggtcaaataagattaacaataataattatcataatcataaatattttacaattcgtctttaaataactataaataaaatgttttcattactaataacaatgaaagatataaatgttattaattgattttatactagtgctttatgaaatcaaagcaagactattaaatatattagtagtgaaaattgtgtatagacaagcatataaatattatttctttttgttaaaatgttaattataagagataattaataattactattttttcgaatgataaattttaataattattatgtcataataaattttttgagggataatatttgtgtcaggggtaatatttatgtaattactcatcaaattttctgtcacataagtttcaatcaggtccaataaggtctagtaagtttcaatcaaatccaatcaagtctaataagttccaatcaggtcaataagtttcaatcatgtttaataagtttcaattaggtttaatcaggtccaataagttgaatcaagtccaatcaggtctaataagatcagtttagtacagggttattcaggtgaagagaacgcacccttaaggatacatgtatgaaattgactctatttttgtgaaacgtttctataataaggaataactatatgttagaaagccgcaaatgtgactatgtctaaacatatacttattataagttatagtatacttcccgtgtttcaacatagatgacgtggtttaacttttgtactatttacactcactcctttgatcatgttttatgatttttacgtttgaaaaatatatttatgtcggatattattagattcatcttgatatatattttcaaaatattaactttttataattattatatgtagggagttagatatattaatagttaagtttctgcgttggcaagtgcgtccggaattgtgtctcaagtatgttgaaacgaaggaagtatatatgtcattacaaaggtcacgatgtataaaaaagtgattgcatttacatatgggtcactatgtgttccacgtacaatatttgacatgcataaccttttaatccacaataacattattacaatttgcaaaccaggtcaacataaatcttactctaaactattaaacatggggaaaatcaagtaattaacatattccttttaacttcaccccaaaagataaacatttttcttagtggtcgtttggtaaatacgaaattatgtaggcaatagaaattcccatgattttcatatttgtgtagttgtttagttgacagatagtgaggaaaacgggggcaatgcaaattcatgagaatttgaaattcccacaaaatatacgaatttatttacctactcttcccttggtcactcacaactgctacataaattcttatgaattacaactttcctactaccaaacaatttaaactaatttataggaatttcataaaggaattaattttctacaaattgtaaattcctatagaaatttaattcccattgcaaccaaacaaacactaacactccgagagaaccaacaatccaactcccgatcctaaaaccataactacaagctatttttactactctattccttttaatataatcatgattcattatcactagcctttacaaattacaatattagtaacagtggattattttccaataaaaaagaatgattaatgtgtgattttgttataagttcttaaaactaatatggtttatgctcgtgtgcaatcattatcctatttttgcaacaaaatgctaagagcttttgggttcaatggtatcacttcctattttctatatggaaaattaaggatcaaaatttggtggaagcataatttcaatgttgtctggggtggggattgggtagaggtgatcattttggcccggcccgtttttgggccgggttttgggcagaatttttcggcccgcgggccgggccgggccgggcccgccccggtcgttttttttttttttgtttttgggcgggctttgggcaagctaaaaacgactttttagtctattttttggcccggcccgttttggcccgcaaaagcccgctaagcccgacccgaaatagcgggctttggacacaaaaattcggtccgaatttaggcctggcccggccaatgggcaaatttttttggccgcggcccggcccatgatcacctctaggattcgggtacttgttggacatctgggtgagagtcttgtgcaagaacaacccaaaagtaaattcttcttaccatgtggtttccgaaaggaggcccaaaaaaatcaacaaaataacaaaaaacaaagatcaatgacaactactttttatttttggtgtaaaggaggatcaacgtaataatcttgtcgagtttgatcccaagtcttaactcttaagtattattccacgagatattactaactaggactgttctctaattctcttcaccattaaaaaaaaaatccgagccaaataagttcaaataatatctaactaaaactaatacaatacttaaaaataagtttcgataaaattgaatcaggtctaattaattcaattcaaataagttcggattttttgagatgaaaacaacgctaccttggcatccacaagaatgacaactatgaaaaggtcattttggctctattatttttggtttgattgcttgcaccaactctcaactctcaactctctagtctctcctcgttcttattcattccagctaatgaagctgctatcgttatcataaacttccctctaactcctttctaacttcccttccactactcttcttcattttctctctcctccctcctttcttttcttcctcttttttctaggaacttcacaattaaaaaaacttaaatatacttggaagtacttttgattgtaatacatatggcaacagaggaagcaaataaagtggtgactgaaacaccggcaccaccggtaactccgccacaagaaccagcagcaacagtttcggaaacccgggaatcaccggttgcagtggaagagaaaagtttagtccctgtatcaacccctcttccttccaccactgaaaaaactcctgcttcggttgaaagttagttaacaattttttttttaatcatctatgattttaattattattatatgatgatcattatattatagtatatggctaattttgctttattcaagaatatttagtgatttaagggcttttagaataattagtgaaatttagttagttttttcccctgtgatataaagatgggtcatgggtggtagttttctgttttccaattatatatttttactatttttggtggatgggtgtttttatttttccttaatttggtattttttctgcatattatccatgtttgttaaggagattacttgcttattttaagaatatcatgagtgttatttgggaatattagggacttatcttagggctttttctggatcatgaggtttgaagtaaagtggttgggcacttttatagtatattcaaaactatttttttcgcttattgctcatttaaacgatttcaaatgagcaaataacaactataattgaagaaattagcctaagctcatggtatgcctgagtgtatggtgtataatttgattatcttagactttcttgtgcgttgcgcagtgattaaagagtaaaggcaattccagctaattttggttatactaagcttttttactgctaattgatcctttgttactttgtcctttgatgataaacctatgtaagcaaagtgcactattcatgaatcatgatactggcctggccattagctattatctatgttacttagacacacggattgggtgtctactcggatgtgggtgtccaagtgtctgactcggctattttggaaaaaagtcagtttccggtttaaaatgaagtatacaagtaaagtgtcgtgttggacacgacacgatacgacaccccgtttttgaggtaaatgaaggtgtcggagtaacacaagctattatcattcatcaaacagaaattagaagctattacatctttaactatacttggacaaccacctagctatacacgagtcgggaactcaattagagtaaggtgagccatatgagccgctaagttggctgtctataatcatgaataaacctaactaaattaaaagaactagtaagagatcaggtatccttaacaaccattcctgcataagattcgtcacacttattttcattaatcatctttactacctgcagtcaatcactttcaattataatatcccacgcatagcattggatagccattttcattccgagcactatagccttcccttccgtcacattcgtttccctcaagtgtttcactttttgacacgccatacgaatgatatgcccaccatgatcttgtattctttttacaattcccattccgattcccacctccttaaagatcgcagcatctacattgatttccagcacattatagcttggacagcaccacaccatgatagaacgctgcccaccagtctgatctgcagcaggcagactcatgtgtctgctgtccttcccctctgtacgagccagttcaaaggcagatggagctgtacacagtcctgtagggtgacgggcaatgctgccatgataaacattgttccgtttattccaaatcatccatgctattattgcaactttacaacgctcctcctatataacatccatccaccatgcagcccagtcactagcacatcattgggattctagaatactctccaacccgcttcttcccacaggaatacagggtagttctaactcaacgcaagggtgtttgttacataaatctttataattcttgcatagcatttccttatgtaaatgaacatgctcaaaatgttttattaaactattttgtttgacatataatagaatttcccttgaagtaccagtgatgatttgcacagtatcagcaggagcacaaaagttgcaaaagcttagctatgatgatgctataaacttaagagtatatactaggttattatttataaactaaacttgagtcttaaggagggttgaacttggaattttaagctcaaggacactcgagctcaaattactacaaggcacaagctgagttgagatatcccaagtttaagctgtctttaacacccctacctatgcacgactgttgctgtatactgttttcttggtttataaggagcctagagggcaatgatgcacatggtttgaaactttgttcttgtgttccagtgtatcactacattaaaaaatttcatctgagctagccgatgtatgctcattatatcctgtaataaatacagttatcacttacttttttctatctgaggttggtttgctagattatgactttggactctcagtatcgcaatatacgtataaatgaaatcaaagactcatttttatctcataattttctctttaaatttgtattttcattcagcgtgtgttacattggcttaaaatttaaaataattcactttttattgacctcttctttgattcacttttattaactagtaaactgtatctgatggacagaggttacagaattatctgaagaaaagactctagaggaaaagcccatagaggagaagcctttagagggctcagttggtagaggtaatagtttcactcatcttgttgtaaacgagcttagtaagtttgatttcagcttatatctcattgttgttgtattcagatgctcagctagcacgagttcaaactgagaagaggatttcactgatcaaagcatgggaagaaagtgaaaaatgcaaggccgaaaacaagtaagagtactttgtatggatatgattagatattagtgctacacccacaggctatacaaatatatattattatgtcatttagagatcacatactcaaaatagcaatgggaatcttaagggtgcttgaaccatgactgaattatttggcttaagttgttttttggtgctaaagaatacgagactcctactcctagcaagaaaagaagaatctaataagtcttaactccacaattgcaaggtcgttaacaatagaagaactcttgtgacttaattttagttaaccaagcgataggtaggcctcatgccaagttacaagatttttcacacatacgcgtgatatatatagctgtctagcttgctctgagcctctgaacaataagcttggcgaggttcttaagtggtttgtcacattgctcgtaccaaccagtatcactcttgtcacctgtcagtgcatcaattaggtctccctatatacttgctggacctgtgataaccattctacactctgtatcaattatttgtattatacttgaataggtctaaaggccaacatttgggttagtctctaaaagttgctggagtaaatttgtgcctatagttgaatggttctgtgcttaaaccttccctttgaatattgctaagagttcagtctgtggcacatcacatcggccatatatttagctgagtttagtgctgatacaattgcttaaccgctccttcccctacccttcagcaactcttggactgcctcctcctctgcatcagtgaatgtatgttgaatagtttagtcctttccatcattccatgcctcctttaaccctcatccactctaaccaaaaacaaaatcaaatttgttatgtgattttgatggttgagaatttgagatacaaaatagccttttgcctcctttaccataacaaccaccgtattgtcaatttgttatagacccatatcgctcattagcctatatgggaaagtcttagatcaatttactcattctgtttccttttgttcttgctccaaatatgtagggagatacaaaagaaagtgggtaatagagaaggagtaagtgcatataatgatataattataagcaaggcatgtttggcatctatctagaatctggttttgggttttaagatttttcaagtcatatgatatgaaatgtatgatggacttaaaataagtcatattcaaagtaatcatgtctatatcgaaatctgacaacagaactcgaaaatattttttctggttctgacatttctatttaattggaaacacaaatgataacgaagagacacactgttgatagaccctttaatttgatggaagttacaaaacaaatttacttacttaatgaactgcgcagggcacacaagaaaattgctgctatcgaggcatgggagaacagcaagaaagcatctcttgaggcagagctgaaaaagatcgaggtatagtgccattaaacaactatctttatctcgagttattttcgaacaatagaagttagtttaactgatgaggccagcttacatgaatgcaggaaagcttggaaaaaaagaaggcagaatatgcagaaaaaatgaagaacaaagtggctatgactcacaaggaagcagaggagaagaaggctacggttgaagccaaacgtgctgaagatattctgaaagcggaagagatggctgctaagtatcgcgccactggaaagccccccaagaaacttcttggtttgttctaataaggactatgtgaattcagtaattacttctataaatgtttgatgtgattaacaattaagcaagtcaattagtttgtgaaaaggaaattatagataagttatttgtatttttttcccatttgtataattgttttatggctttattggtttggtaagtgtgtatagtttgggtagaacgatttaagaattggtgcacatttgtttctatgtggatattgtttctgttatgtaagtaaattggatattgtttctgttatgtaagtaaattggatattggaccacaacttgtgtctgatgtctatcatttcctattgtcttgtcagtcgtttgcaaattcgcaaatacaaaggtttaacggaaacctgttctcctctgaacagatagttggaatcgtgtgatgcccactccaagtgcatatactaaagtcccgctcggagaacagttgtccaaatatcctaaactagctgaaaattatcctagatatgaattaaactttagagcctccaaagttatcacgttatgttatatatgtacgtagaagaattcatccgctcctgttagtgttcagctaataaatcagtaagctgttagttctgcataatgtaccagtactactacaaggattacttaagactgttttcttactaatgaggtctaatatgtgacaaagattgtcaagattatgtaaatcatgcctgttagtataaaacaagctgcactgactaattttattcactggttggagaatcgagcaacatgttcattgctgtatctgaagtgtcacctgatgcaacagaccctgagtctgtcctctgctgctgctctgttttgacacctacgtgttgcggaacttggcctgttacccctgaacaagcctctgaggaaggtgaaacacgatcgattttcaagggccgcgcattttggatcttcctaaaggactctccgacctcggaattccacatagaaaagaagtgatcagagttggttctggaatatcctgaggggttgtagagggattctaatgacaatcgagcctcggtctccaatcggatactttcccattggaccatatgacgggttgtatgtgactttgatggtgtagtttctgggtaaacgttgatggtttttcgtttcctcaagtggctgttccagtggttcttgacatcattgtctgttcttcctggtagccttgctgctatagcagcccacctgtaaaaatagcatgcataatacttaggacagctaacctttgttttatcaaccacgtaatttctggatttgaggtatcttgctaccttgcatacaagaaatgataaacatttatacaatggatgcatctagcaaagtgtctgtgatatagtgtttgtgttgtttttctctccttttgctacttcacaaacgcataaaagacaattgacggaagagttataccttttatagtctaaacgagtttttatctttaaaactaatatgacaacgggaaaagtatcatttaagtctttaagataataaagtactagttgtcttctctccttttattaagcacttggtattattatatatgcacaatataatgagatttagcgtaaaagttgtcactttttttaattggcgatgactataattttaataaaatatttcatagtttaggtaagagattatgaaatgataaaaagtttcctaactatttctaaagagtatatttttcatgtgatatatggtatttgtaatcacataattagggataataaaacaattagaaaaatacctattgccaaggagtccatgaagttgaataacagtctcgttttcctcttcagagaaaggacctcgtctaatgtcaggtcttaaataattggtccatcgaagacggcaactctttccacatcgagatatacctaacatataacatcaatatgaaattttatcacataaattaacacatagaagtattatattcaatttttcatgaatgacatattcaagcttaatgagttaattcaccttattggaagtatagtcatatacataatcaagacaacctttctactttataggtagcaagtaaattgtaggactttgaggtgggctgggttaggtccaagcaagaagaaagtacttccgaaaaactgctaaagtatttttctgtaagaattactacacaagaagcaccagtggtctagtggtagaatagtaccctgccacggtacagacccgggttcgattcccggctggtgcataaaatatcagagctgtgatgataatattgcgcctctatgtggcagattgggtccgccaccaaacgtctgattcctcggacgaagctagatcgcatctgagctttgacttttttgttttttaaaaaaaaaaagtgatttgagggacaattttttgagtgatgataataataattgtagtggtacaaactacaaaatgatagtaaaagaaacatacaatcagcttttctttttttttttttatcaaatgtttttgtcaccatttgctcagaagaaagttataagagatttagctgaatccaagttctcatagcttaagtaggagaaaaataatctttataaggtacattatgttatgactagaattgtagcattaataaccaaggatgtcttggcctagtggttaagattgaggtgctgtgagcgtaggtcacaggttcgaattcctcctccccttctttgtactttgtaccgccttcgtggctcatatagataaaaaaaaaaaaaaaaaagaattgtagcattaatcttcatattggccaaacaagtaaagaaagtaacatttgattcataaattaagagatggcatttattatttttaatttttttttattttactttatacttctaagttatatttatatcattctaaattagtatagtacttttgaaatttagacgtttgattcaacttatttaattagactttattacaatatccataatgatacctttaaataagaatactaaagattatatagttactagtatgatggagagatgcaaactcatatatgtataaattggaaatatgtactccctcctctaacaattgtaacagttgacatacacactgtttatatacttattttgaccatattcaaaaagtaatattggtattatgtgaaatgttcttgaatttatcctgaggcctgtaaaaattgtaagtaaatctcctacacgagaatagtttacatgaaaaatgatatcaataatgacctatataatgatatcaataatgagttatatcgataatacatgaaaaattttgtgaggtatatccctccaaaatatcctattacctggtatatcgtcgcaaaaaattcatttattataagtttaagaaaataatgatagtaaaaacactaacctgcaacttgagggagagacttccagttaccaggatgaccattgttgttgcggatgaaatgaagaagcttttggtcttcttctggagtccaaggccctctcttgaacatattttcatgatcatcctgtttctttcttttacaacattttgtggatgaactttttggcttccccataatttacaacaaacctcatgactttactaaaaggtaaaaaatcacttcctctttataccaataaaaaagttgaatagtaaggtaaaagaataaaaacaagaaaaaacaatggatgaaaagacagttcaatgagatgaagaggatgatgaatgatctgaatgtcaaattctaagtgtagcagccagctctctgaacaaagagtacttgaattaaatgttgtatccagtagtactacataatgtcttttaaatattttattataatacacttgtttgcttatgtcgagtcatgataatctcattttgaagatggacaacgaatatttaatttgagagttctttttaccaatattatccctgaattaactcgaaaaactacttgttagagtagacattaagagagtgtttgatcggaagggaaaattttcaaaaagaaaaacgattattttcattttctcttgtttggtttataaggggtaaaagaaagttttaacatagtggaaaatagtttcaccaaggatggaattttacctccttttttcaattagggaagatgattggcttaagccttaagggccaaccctcttaggtaggactgtttgtgagttgagttggtgcaatttgggatgtaacccaaatcaaatcacatatataaagtttgacattttttcagaccaaacctcaccgcacttttttccaaactggaccatgcaaaacggcctggtgcagtgcggtttgcgatttaatcatattttcctccgtgatatgagttttgtaatctaaaaattaaaaaattgtataaagatgttgataaaccaacacacaaatctttaaaactaaataataaatacaaaaattccaataaaataaaaagacttcacaattcacaagctcccgctagcagacgaagttagaagaggcaaaaaaagaggagcagataagtgaagggggagacatgggattgcaaagaggagcatatgagtgatgagtgcaaagagtcaaagacctaacatcctattctaatactcgtgtagtcatattaacttgtaatcttgtatatatagtcgtattatctcgtatactgatttgtgtgtgagtttgtcaagtgtattttctctaaaaaaatctaaatagataaactttattttttgaaaaaaatcatataaatttgtggtttacgttgccatttcggtttacaaaaattcaaacccaaccaaaacaacaaacaaaatcacaaaccaaaccacaattttgaaaccgcggaccaacccagacagcgaaaacatggttttggttagggtaagtttattgcaagtcttgaaaggagccttgacttgagacttttgtggatcttgtgcaataaactattctaagactccatagagtcttaaagtgagttttgatttctaaaactcaactcaagactccccttgccacatgtctcaattctattggaattttttttaaaaatattagcccaaataaaaaaaatctaattaataaaaaaaaaagtgagtctttataatagtctggggataaagtataaaagtaaagagagtcttaaatgaatctgaattagtggaaagctgatgtggcagagtctgaagtatggttagagtcttgcaataaacttacccttacggtttgatacggtccagaccgcactctgaacaaccctactacgtactaggctactaatatgttaggcgcactaatttcgaggcattacaaggttttacaacaagaatacaaccctaatatttgaggtggtactctattgaacaacgaaccttttccttatgaattttatcggaagaaattcaatacctcaatctcattacttatcttcctctttctatttttttgttttgttttggtgaagtctttctattcttttctctcattaccacttttcttgtttttatctcacatttcttacttttatctcaattttcttgtaagaaaccaaatatgattgaaaataattgcaatcatgtttttttccttagaaattattcagaagagtatttttaattgaaaatgtcatttgtccaactagaaagagcctaataattatgaaatctcacttaattatattaaaatcaatcttgtaaaatctataataatagattggccctctcataaagtcggtaaaataaagcaataacataaataagtgtagttggtcttgtaacataccgtctaattttgatttaaaagtaggcgcggcctaagtccaatattaagaagagaatgtacgatctttcttgatatagtgactactttagtctatttagtgacaattttaatctgttcagtaataacattctttaactcatttagtgactggtttaatccatttagtgactagtttaatctatttcgtaagaccgtcagactattttaaaaaattatttgttgtaattcgagattcaaagggaaacaaaagaagcataagagaatggatgattaagatagtgtaagataattagaaatagtgttaggttaaagagaaatgaaatgggcttgttaagagaatatatgcttgagttgtctaattttatattaaaattaaaccgtctattataataatttgtttcaagtgtcaaatatcattaaccaaacttgtatttttgttggagtagggtggtatttgatttaatactactatgatgcatagttttgtcagaggagaaaactagttgatataattcaatatgtatattagactacaataatttttgtatgacgttgaattaattaattaattttaatttaataataaacgagtaaatccatagaattttgcgatagatttaacaaaattcactacaggtcacagtagtcaataagcctctgacacactctttgacaaacacaaagacataaatgatagtattaaccattagtagacctagctagtatatatggactatggtctatatttatgagattttcctcagagaaaaattggggtaaagtacaagtccttaaataaacaaataaatgcgactaaccttaaatgcaattgaagccaccctgcaggattacatatctttaagttccctagctcgactgtcctttgtactgttctccatatatatatgtaggataattatttcatatgacatgtagaataggtttactatgtttcttctgatcagaaatcaataacaagtgtgaccataaaactgggaaattgataaattgccttagaaatagtcaattaggcaaaagattttgatttaaggcgtatcttttgaattatttttttgaaagagaaattttattaattgaaggtcaaacgacatctacaatagatattaaagaaaaaaaagatataattaaataatgttaaatcaaatttgtcttcgaagaaactaaaatgaaccagatcgatcgagcaatacagcgcaacccccttgtatttgctgaatcaaacagctattgatgataaagtctatcattctgatatagtttgggaagagcattcttgatcgagccatgttaaacgtatatgagattccaataccttaatattgagtgaatttcaactaatgaaaacaatttctcatatctaaaatttaaaaaaactctactcacaactcccatagaggagaaggagatctccacaacaaagactaaaacccccataacaggatttgaagaaatctcataaagagatactaatttattcaacaaaacaagaaaatgaactaaaaagaaaataataaaaggggaaaatggcttaccatggatgaaatcatccatggcagctgatagtttatgtaattagaaatatgtaaatattttaattactaattagttttgtattcctaattagtttcctaactaataggctgtaatcttggatgtatttttggtaaactttgactatagcttgctagcctagtatagatagtcagtttgtaatctaattcaaatcaaggaatatatttctacatggtatcattggcttagggttttcgatcctctcaccactttccgctgccctagccgtcgcacagcccacacgccaccatggccggcgacattccttctcctcctcctccttcttcttctcttctctcctcttctctttctcatgctaatatcaaacaaagtgttcccatcactcttgacatggaaaatgtgcaatactccacgtgggcggagttgtttaagatccatgcacgttcaaatcgtgtcatccaccatattattccttcctctacgatcaaggaaccagtcacggatgctgaaaaagaggagtggtccaccattgatgcgactgttttgaaatggatttatggcaccatttccacggacctcctcaacactattcttgagcctgactcaacggccttggcggcatgggaacgtctccgaggtatttttcaagacaataaaacttcacgggccgtcacccttgaacaagaattttccaatacttctatggaagattttcctaatgcatccgcatattgtcaacgtttaaaaatgttagccgatcaacttaagaatgtcggtgctccggtttccaacaatcgcttggtgttacaaatggttgccgggctcacggatgcttatggtggggttggtactcttctccgtcaaagtgatccgcttccccccttctatcaagcgcgatctatgcttgtgcttgaggaagccggattttctaaaaaggcctccctaggcgcaccttcagccttagtggcggattcgtcccgatccgtttctcctccctctcaaaattcgaatggtggtaagacaagtaaaaatcgctccaccacctccggcagaaaatccggtcaccgtggtggtggtggcggcagagggggtggtcggcactccaccggcggcggcagtcgcaccggcggtcaccaacagccggccgggtaccagcagcagtggttcacgggcaggcagcctccttcctttcctccttgggggggggggggtggccttatggttggcccatcccaccatgtccctttcctactcaaggctgggctaggcccaattctcaagcaactggccagcagcaaattcgtccctctcagggagttttgggccagcgaccagcagcttatgtagctgaaaatggccaatttcagcccactgatgttgatgcagctttcaacacttttgagctcactcctccggacccgcattggtacatggatacgggggccacgtctcatatgacgtcctctaaaggtactttcgtcttattttaatttgagtaaaaatgatggaattattgttggaaatggccatactattccgattagtggttatggagatatgcacttgaattctagtaactcacctttgacccttaaaaatgttttgcatgcaccccaaattattaagaaccttgtatctgttcgtaaattcactactgataattctgtgactgtggaatttgatccttttgggttttctgtgaaggattttcagacggggagtcttctcatgagatgtgagagtcaaggggcgttgtatcccctcaccactgccttacaacctccttctagctttgcttgctattgctccctctctttggcatgataggtttgggtcatcctggtgcttctattctagatgttcttaggcaaaataaaaccattgaatgtaataaacttagtgattcttcagtttgttactcttgtcctttgggaaaacatgttaagttaccatttattgcttccatttctagtactgtgatgccatttgacataattcattgtgatatttggacctctcccgttttgagctctatgggccatcgttattatttggttgtgttggatgatttttctgattttgtttggacttttccacttgctaggaagtctcaagtttattccattttcttgcaatttcatacttatatccacactcaatttgaacgggaaattaaaaatctccaatgtgataatggtagggagtttgataacacaccattttgggagttttgtaaatcacatgggctctctcttcgcctttcatgtccctatacttcccctcaaaatggaaaagccgaacgaaaaacttcgcactcttaataatatggttcgcacattacttgctcatgcttcccttccttccactttttggcatcatgcactccaaatggccacatatctcctcaatattcttcccaacaagaaactagcccataaatcacctcttcatattctctttcacaaagaaccttctttttcacatttacgggtttttgggtgtttatgttttccactacatccctccacttccatcaacaaacttcaagcccgttccactccttgtgtatttttgggttatcctagcaatcatagagggtacaaatgttatgatttatcctctcgaaaaatcattataagccgtcatgtgattttttatgagcagaaattccctttttctgccatccatactccccaggcccattcctatgattttttgggccccttgagtcctctggacctccctaattactcctccacacaaactgcagcccacccgggcccatttcttccccagcccagctgcaatctccccgcgtccctccagcggaccgtgggcctgcccctcccagcgggtctccttccttgtctcggtctgggcccagctcccctatgcagccccccacctcacctattccgcctgggccttcctcctctctacagccttctagtccacagtctgcgtcctcccatatttccccacaaagagccccaccctcccctcctttggttcgacccactacacgcagccaaaatggtatttttcgcccgaaaaaattcctcaaccttaatactgttgtgacccggtctcctcttccccgtaaccctgtgttggctcttcgtgaccctaattggaaaatggctatggatgacgaatttcatgctcttattaaaaataagacgtgggagttggttccccgtcctcccgatgctaatgttattcgttctatgtggatttttgctcataaagaaaattacgacggttcttttgcgagatataaggctcgtcttgtaggtgatggcaaaactcaaagaagttggtattgactgtggagaaactttcagtccggttgttaaaccggccactattcgcatcttgtccttagcttggctttgtccaaaggttgggatcttcgtcactggatgttaagaacgccttcttacatggggacttacatgagactgtctatatgcatcgcccccaggctggatcctcgcatccgtcacatgtgtgtcttctcaaaaaatccttatatggcctcaaacaggcgcctcgtgcctggtatcgcagatttgctgattttgtgtcacacattggcttttgcaatagtaagtctgatagctctttgttcatctaccgccaaggtaacgatactgcttatcttcttttgtatgtggatgacattatcttgactgcctcttctgatgccttacggacgtccatcatgtcccaacttggctctgagtttgctatgaaggacttgggtcctctgagttactttcttggtattgccgtctctcgtcatgcaggtggtttgtttttatctcagcgtaagtatgctgaggagattattgagagagctgggatgtcggcttgcaagccttcttccacccctgttgacacgaaacccaagttgggtgccacggctggtgccccgtgtgctgatgcctcccattaccgcagtctagctggggccttacagtatttaacatttactagaccagatatttcatatgcagtccagcagatatgtcttttcatgcaccagcctatggaggcccatctacttgcactgaaacgtatcattcgttacataaaagggactcttcatcatggtcttcacctgtatccctcttctatttctacactcatttcctatactgatgctgattggggtgggtgtcctgatactcgacggtcgacgtctggctattgtgtttttcttggtgataatttgctctcctggtcctcaaaacgacaaagctactttatctcgttcggtctttgagtcgaataccgggggtagcaaatgttgtttcgaatcatgttggctacgcaatcgctattggagcttcacttgtcctattcaaaaagccaccttggtctattgtgataatgtcgagtgccatttacttgtcgtggtaatccaagacaacatcaacgcacaaaacatattgaaatggacattcattttgtacgaaaaaaagttgcgcgtggtgaagtacgtgtgttacatgttccctcacggtatcagattgccgatattttcactaaaggtcttcctttgattctctttgaagactttcgggacagtcttagcgtccgccctcctcccgcttcgactgcgggggtgtgatagtttatgtaattagaaatatgtaaatattttaattactaattagttttgtattcctaattagtttcctaactaataggctgtaatcttggatgtatttttggtaaactttgactatagcttgctagcctagtatagatagtcagtttgtaatctaattcaaatcaaggaatatatttctacagcagctcctaaactgttgaagaagggatagaggagctagggcgcggttttagagagaaaagtgagagtaggggacggctaggttattaataagtaagacctagacaaattaatgattacttagcatacgcggtttcaagtattctatatatatatgaaatgattttcttctaagtcaatcaaaatcttttcaaaatcgtattgatctcaatcaataaactaacttgtagtaactagagtccagactgataaatatcataattcataaagattttattttaaagagaacctccaaagtcacataaggagagaaataatacctaatatttagatagagaaaccctcaagagaaagagtgacatttgagaagctctattgagcacattagcttaaacttatatatatatataaaaaaaagagaaacttgatgcttatcttcgcccagagacatatggcagtgcttatacaaaaagaacaactatggttttcgagagagaagaaagaaaaggagtttgcttgttgtggaattattttttctttataaaagaaaaattgaaagctagctccataaatatggatttaagataacaactagtttttttttgctcgggctatgcctcgggttagttacaataaacaaacatgtcaatatttttaaatttcataatgtattttgctactttttatattttttgtgcattaaaaaattcacgtcacaacatgatagtaaaaaaaattgaagggcttgagtttgaaaacaatatataccttataagaaattgtggcaaaagaatatgacatcaatattctcttgtaagttaagtctttttagttaattataattattacaagacttcatcacattttatttgaaacattaaacaacaaagtcatggcgtattgatggttaagctcttatttttcatttcaaaggtcatgtgttcgatatcttgcacttacacattttttaaaaagtgtgagttacacatagacataaaacatttgcattagaggtttgagaagagtgccacgtgacaaatcgactttctttcgcacgccttttaatatatttgtatagattttaccaggcttatcactctaattagtaattatgagagcatccgaaataattttcacaaggttcccataaaatagtttaaagtcccttgacatggtagattatcttttagagaacgtattgtgtcggactcgtccgaccataatctttggtcgaacgactttcaggtggttccaattttttttcagttagtcttaattttctttcaggtagtcttcattttttttcggtagtcttcatttttttcagcagtcttcattttgttttcgttagtcttctttttttcagttggtttttgtacttgatttagacttactttgggtttcggttggtctttattctttttcgtgtagtcttcatttttttcgtgagtcttcgtttttttgtgtagtcttcattttctttcaggtagtccattatttctttcaattggctcattatttctttcaattggtccattatttgtttcagttggtatacatattacgaaacaaagtccaactgaaacaaaataaagtccaacagaaagaaaacaaagtccaactgaaagaaaacaaagtccaactgaaaagaaaacaaagtccaactcaaagaaaacaaagtccaactcaaagaaaacaataaccaaccaaagaaaacaataaccaatcaaaacaaaaaaacaactcaaaataccgaatcatcttctcttcccctttaactccagtagtagtagtacttccactaccacttcttcactctcttcactcttccaaaatcttcgccattacttgtgatgaccaattattgcactattcatgcttgattggaagagtctttgaaagaaatgccattcataatcttcgccattacttgtgatgaccaattattacgccattaataaccgcatcgaaaaacttcctacaaagatgaatggcatttctttcagcatgaatagtacttccattacagcatgaataggctggaaatcttcgccattactgtaagtatgatgtatgtgaatttccagatcagagaactccattctgagaagtccacttccactaccacttcttcactctctctcctccgccgccgccgcactaatcattcccactctctctccaatgtcgctttttctctctcctccaatctcatgcttcgcgtttttactcaggttcttcctttttttttttaataatacactttggatctgctttctttcgtttttgattagttagttttgttgaaatcaagatttttgggttttaaaattgaattttcagaagattgaggtgctagttttgtggagggaagtcgaaaataaaattgtatagtactgggctcagcctgtctgacgagaatattggatcagacggtctgacccaatactttcactatcttttatgttttccttcattcattaaaaaagttcaccattaactttttgggtaactttttagtttgttcattcacctaaatatgagctcaaagaatgtgcaaaacatatatgaacaaaatcacattcctctttagtggaatatttggataattctatgaaattaaacacaagaaataccaaaaataaagcaaacctcatgcacgcaaaggaagagacaagcatatcctaattcctaatacatagtttttggcatagcatggttgcatatttttttcataaattgtccttaaaaagggaattactttatctccaagtcatctaatctttagaaatagccctctttattcccttgtaagccctaatataattataaatcatgtataattaacaacttctctaccttcaaatcaaagcaatctttaatcacaccgtgatcacaaattaaaaatggttaagctaacgataatcggaaggattagagatggcatgccattgacacaaggtctaaggtatgttaatgaagattacaacaacattccattttacaagcaacatgctgaattcattctcaaagaaatctcaagaggttctttagctcttaatccaaagatgactatacgccttgatcatcaacattctttcaagtatatatacatcctccttacaattagattttttcgtaacacccttaattaatttcagtttagttaatttacgcgatataattagtatggctaattatactttgttcttcttatgtgatcattgtaagttgtttggtcgatagtggtgtttgcttcatcacattatgtgattcttcatatccgagaacactagcttttcattaccttgaggatttgaggcatgagttggagaaatttcaaggtgatcaacttgttgagaatattacaagaccgtatagttttgtaaaatttggtaagaagctctcacctgtttcatttatttatttgcgttatatggtaagtatattatattagagtcatagactagtaatatattcacctaatcataaggaaactagacctgttttcgtactagtttagaactctaatataatatacttatgataactctaatattattcgtttgttagccaaaacttgtatgagacggtctcaacttatttcacaatgagacatgtgtgtattttttagctaataataaaaaattaagattctttattgctaaaataaataatagtttgttacgagtattttgcataattaactataatattatcttgtaaaccgacataaattgtttaaaaggtaactttaaagttttttgggtaacttttaaggaaatttcatagacaattttggtatcatctatggttaaccttgtggtctaattgcgagacaatctcacccaatgctagatattatttcacggattgatcataataagattctatgtgattaaaaaaaaaacttatgtatatattatggattttcttgtccaatatgtttttcatttgtttaacgtaaatttatgtctgcagacagtgtaataagcagcattaggaagcaatatgtggacacaagaacacaagctaatataaagaagttacatgcaaattctgggcaagaattaaatatcatagtagaaagcttgtctacggttgtaaaaaacagaaagcaattaggtaaaatttctgtctcttatatatattactattcaactgaaaaataaataaaattgggcaaacttttatcaaatttgtgaaaattaaacatagtttcattgcattgctagattatagggagaaagttgtcatggctcctcaagctgtttcacttatgtggagttctcgacgtcttaaggtaggccatttattaaatagtcaaacatttgttaagcatgtctataattttttgtgtacattacaaatcaagtgtaccaagaactttttttctcttttatctggagaatcttttgtttgctgctccattagaactaccaaaatgagcaagtgtgctaaaaattatatttagtactctttttttttttttttttttatctttctcactttcctgtgcacacattttttaatgtacatttttgaacttaaatatttttcattatatattagtaaaaattataacgattgaatattaataatgtactaattgagacaaatcaaacaccaccccatatgactataattttcttataaattgaaaaaaattgagaagattctctctaattctgaatagtgtcaagatactaaatgaaaacgataataatacttcctccgtttcaaaatactcgctacactttccattatgggaagtttcacattacttgctacacttcttttttgggcaataaactctctttatctctctcctcctacatgggtcccttttctttttactctctacctctctcttctccaaaaattgcctaggagtccgtgaattgagaagtgtaacgagtaaaataaaacgggggaagtaataaaaaaacagagggagtacacctcaatatttgaacatttcttcaatgtaacataatgaccattttcaactcttgtatatgaaagacaagaaaacattgataagttacaaagacaaacatggaaaagattgttgaaaacttggttttataacatgacaatttctagagaattaccatttgcaattcccttccctattgaataagacaagtttatcattttctcctctaaatttgtatggaaaaattgaaaatttcattgaatggactttcatttcatgttatggcagatcattgcattgaaatggacgccaattggaattgcaatcactgtcgtggtcactcttctattgtgggcttccttggtcatggcaaattacgtggctttgtgctcgtgacataatgtcgtagaaggcccaatacacttttgtcattttttgaaactttgatttctacaaaatactttatatgggttgtttggttcattatttttgagttttaagaaacataatcaattatcgattccctttcttcttgcttggttcaaccccacatcaatcccttaccattacttgatggtaatggctacccttcatttccattacttggcttggaccaaacactcaataaaggcaactattttcgttacctttctcctcctctatttgtatccattccctttccatttcatatgttgaaccaaacgaccctttagtctgctctacatttattcccagttacacaagtggtttcaaggaaactatagcataatgtaaacagttcttcagatagtgaaaatgtaagacttttgggacttacaagatctctacaaaatagccaaaaacttgcatagaattcttaagactgcaaaaataaaatgagtgtaatacttgatcatggtcatactgttggataccgtaaactactaagttatatggattcttgtgtgaagcattcaagggagatcgaagcgacacttaaatgtgaaagaagaatccatactacttgttttgtgtgaagagatgctaacttatctttcatgtctttgattcagctcttagatatgaaacatattagcaagtacattgctatgaaccattcaatggagatcgaagtgccacttaaatgtgaaacaagaattctcggtactattgttgtgcaccttcaccatagacgctaaattctctttcatgtcttcatttccgctcgtagcttcaaaatcttctatgttatgccaccaaaatttattgcaaaactgctcacaacaacatccatctcggcctttgctagctaactttttacacaagtactgcaaaatcaaaggaattctttgtagttttgcaagtatacccaattaataagtagacttttatgctaaaaaacaataaaataacaagatccgtctcaaaatcacccctaataagttccaatcaggtccaataagttgaattaggtccaataaaatatgtttagttcagttcaagtcaaataagttcagttcagggttgtttaggcgaagagaacgcaccctaagtctccaatgaaccctcaattactatggagaggaggcactaatagtagccagctcagctcatagctcaaccacctaagctcagcacctagctcagctcaacaagttatttcagttcagttagttctcctaactaactatattcaactacgtattctctctccttagattgtaattcaatgatgttagttcacaatattctctcattttgtaattattgagagtttcttatctctccaagattcttctttcttatcagtaaaacttcttctatattgttgttgattataattgatcacatttgatcaactaacaattaccctttattgctctcaatacccctttgatctgtctgaagatgctaaaatcctaacccaccttcctgtcttaactccagtcccgattcccactctgtaatagcccatctctctcctctgcttgagaacctcgcctcagcagtcagcagccagcagccagcttagctttcggactgtaatacagtggggggtgaagggtggcggtaattgtgagactcgaaatatgttgacagtttacagttggggtatgacagtgtttggccccaataactaattaaaatcttaaaaaatcttatgtataaaacctcaaacaacagctaatctatatataaggataagatcagtacctcaacaataccattacaatagccaagtatagtcaaggtagatggataggtgctccaaactagcccatctacaaaagctgctgaagttcgttttctgagatgatattgcctcgccactttaaggtgaacattgttctgttgggaaggccgaattgttgctccaaattcattgagttcgaattccaccttcaaaattaatcaaaaacacagacaagtaaattatttaacagcacatctgaatcaaaagttgagacatcaaagattgcactcctgtacctgtatcctggactgtatccatgggtcaaatcttgagtcaaatccaatgctcaaatagattttttgtcccgctatatgttccataaataccttaaagcggatgaaccatgatgtatctaaatcacaagaaagacgaaaatgcaacttaacaaggcatttatcagttggtaagttaagtttaagtaatgatggtacttggtccccctcatagagcaactcccttagatttgggcaatcgatgaaaaccttcttacaaccacaaccacggtatttgaaatacctcaaattcggacaatcaacataaatctcgtgaggatcaaattctatttctaacttccttagatgataattagctgctttaaaccaatctgcatcaatatcttctgtcacaagctttgctttctcaagaagtggaaaatcagctgtaaggtctccatatacgatataattgtctactaagtggagatccctgataggattatctgagctgaacaataattccaaatgagcagtacaagaaaaactctcaaggtttacacattctctgatgtcaacttcacaaatccggccattctgtgaaccctcaacataggcgttctttagcttatgaaatatagaaagcgtgagagttttcatcccaaaagtgcaacatttaaactctaaaagttcaatcaatgggcaactacttgccaagttgcttatggtctcctcatctgacaccataacatgtgagagccacaagtgtttcaaagaagaatacatcccgaccacatagtttccaacagtggatgataatcgacaagctcgtacagtaagagactgcaaccattttgaagaaacaagtatttccaggtatggaaaattataacatgtgtccgcacatatatcataccaacaaaagtcttttgtttgaacaaaaatgcacaactcctcaaccctagtttgtctaactagattcatcaatcgatcaacatgagaaaagtcagcattattaacaaccagattcaatgttaattctaaaactggcgtatgttgttgatttatagtcaacaagcgattattcacagaattcatgaatctgtcctttatttcctggtcttgtccacgttgagcagaaagtgaagcaaataaagtctcatcaaaatacaaagattgcacaattttgtatgaagagcatacatatttccaggtcttggacagaacagatgttcgaatagcatcttttatgagaagaaatgatagtatacggtggaatatttcctccggcaatttcgaaatcaggtccttgtgattgatgtaatacatctttttctttatcagattcttgttcatactatcttattcttcgacaaaacagatgttggagtaacagtatgctgcacatgtaaattacaccattaaagttatccagaaactgatcattgttatcagttttatttatgaatgaggagatgaaagattagacacttctttccacaaaatgaaaaaaatcagttgagcaagaaatatattaaaatcagagctatacaacaaacattagaagattaaaaatatgaatggtaagagaattaaagaaattcacctaaattgacttcgttgaattcttgtaatcttgttaccagggatttgggaagaatgtgattttcaagatacaggagaaataaaaaggattttggtaaaagtatttgtatttgaagatggcaatgggaaacggaaagagaatcctaatttattgaatagcgccttgattgtactacagttcaccacttttaaccatccggctgttcaagaaattggatcaagttgatctgatccgaaaaatctgatatcggatccgacatatattcgaaaagtctgattcttgacaaattagaaatatacacttttggcgtgttcggcacaagcttttcaagtagccttagatggtaaacttaattgtactaacgtttgcggattctcgtgatggccactagtccgggctggcagaccgaatcataggccgtagcgggctgggctgagattccatggtccaggaccggactatgaaattcatgtgttggtcgggctagtccgtgggctgaaaaatcttgactcacaccgatctgttactggttttcacggttcgggaagcgattttggcagttcatggatctagtgggttggatcggggtagcgggccgacgtgagaattttttaaaaaattatttaatcattgaaattattcgttattgttacataaaatctttaaaatgaattaaaatatatacaattattaatattaatgaataatttcattaattttaaatttgattgaattataatatatgcaatttgattaaaatatatacaatttgattaaaatatacacaatttggttcaatatttaattggactggactgggctggtctgattcatgggccgggctaggcgcaaaaaaaatctggccacgacccatccaccaattttacagtttgagctacgttagaccgggatttatgcgagcccgacccatacgacccacgaggtgggttgggctggattggcccgcactgttggccatctctagcggattccattcaactttttgattccgaggcactatataaggtggtcatgaactcgtaatgtcatctaaaactcgtgaacagtcatcagtgtgttgcttttatttgtcaagcacttttttttgcgttcattgtgcttgatactcaaaaagtatacgaactctttttagtacctacactcaatagcaccaaagacaacaaaagaaacttcattggaatttcttaaatctggtatcatgttatctgattgtaattattccgatctaagatttggggccggatcagatatccgatttgaatcgccctagactcactaaatgacctatcacaacccagttgatctcacacacactccatactaggagccgatctgatcatggacaccgtaccagtagcagtaaattaagtacatcaatcttgacctccaatagacaatacctaacaaatcttgatgcttaaagattaaaaacatagtaatctatttagacttaaataattcatgcaattgccctcatgttttttttttttgataaggagaaaacaacttagcactaaccctataatatgatcagcttagagcatcctctccggtgatggaaaaaaacacaatgttggaagaataaaaccaatacaaaaagtgaatgagcctcgtgaccatgatgcgccatgtgaagagcttcaaaaccctttagctaaaattagatacatttcataacaattacttgcatgatgataaaaatcatccattaaatcttagatttcttgcgaattattcagtctctctgaatttcctattgaaaaatttataaactacagttacaaaataagtaaatgaacttacttacataaatgagcacctttttttatattaaggctacatttggtacgggtaaaatattttcctgaaaaattatcttcctttattttcaattatacattgtttggtttacaaaggagtatacaaccattttccctagaagaaaaattactctttcactaatagaaaaaccattttcctttcaaaatgaagggaaaactggttttccttcatttttcttatctcttctttacacacctcttcctacctctttactttctttttcatttttctttcttttcatcatttttcttccatgaaaccaaataacggaaaactaattttagaattgtgttttccattgtaaaatgtttttcatgaaaatcattttacaatgaaaatattttacacccaacccttatctagtcttttaagaatttgataatgcttccttttatttgtccaggtaaatttaatttgggcccactaaaccctaggtctattatattacaattattcatagtattcgtaaaaaggtctgccctacttattaccaaaatttctcgctttgattgacgacttcatcaaatcacccccaacaagccaaggttttttcaaattatgagcaaatctttcaaggtcgttccatagaagcttcctatttctaaacttagtacttgcaataaggacaaaagaagatctagtagatattacctcaactacgccgtagactccctatgcaacttctccaatgacttgaaaatccaagatgtgtgatttccaaaaaagaagaatatcgcctgcagaatccattggttcgagcaaatgccaagtgtcatagctaagatctctaatgatcccagttgtcttttccctgcccacaagtttcggctaagacaagcaacgacgggtagtttcgtaaggtcatatataactcgtgaactgtcataagtctgatgattctatttgccaagcactttttttgctgttcattgtgcttgacaaactcaaatagtatattaactcattttagtacctacacttaagagcaccaaattaaagacaacaaaagaaacttcattggagtttttcagatctgtgttatctgattggaattattctgatccaagattttgggtcggatcagatatccgatttgaaccgctccagactcactaaatgacctatcacaacacagctgatctcacacaaactccacactaggagctggtctaatcacagacatcatcccagtagcagtaaattaagtacaataatttcgacctccaataaacaatacccaacagatcttgctcatgattaaagattaaaaagatactaatctatttagacttaaataattcatgcaattgcgttatggtttttttttttttggtaaggagaaaacaacctagtactacccctataattggaccagcctagagcatcctttccggtgatggaataaaacacaatgttggaagaagaaaaccaatacaaaaagcgaatgagcctcgtgaccatgatgagccatgtgaaaaaagcttcaaaaaccctttagctaatattagagatattccataacaattacttggatgatgataaaatccattaaaatttagatttgttgttaattattcggtctctctaaatttctattgacaaatttataaactatcgattactattttagtaaatgaacttacttacataaatgaacatcatgaaatcattaaggctatgtttggtacggcgtaaaatattttcctgaaataattttcctctattttcaattttacattattttgtttgcaaaggagtgtaaaatcatttttcctagaagtaaaattactcttccaatgatgtaaaacaataaaaaattattttccttcaattttcttatctctcctttacacacctcaccttacctcctttctttttcatttttctttcttttcatcagttttcttccatgaaatcaaacaacgaaaaactaattttgcaattgtgtttttcattgtaaaatatttttcatgaaaagcattttacaatgaaaatgttttacacacccaacccctatctagtctttcaagaattggatgatgcttccttttatttgtccaggtaaatttgggaccattaaactctaggtctattagattacaattattcatggtattcgcaaaaaggtttgccctattctagacacaagttttccccccaaatttctcgctttgattgacgacttcatcaaagtcacccacaacaagccaaagtttattcaaattatgagtaaatctttcaaggtcgttccatagaagcttcctattttcaaacttagtacttgcataaattgaaggacaaagaagatttaatgggtatcgattgcacatccacttattctctgagtagacgatgtcttggcacgtatgccttaaccatgcccttgccggtgtattggagttcactttcataagaacacagacaactacaaacctccttcggtcaccatggattgaatgggcatcgatttttataatgctcctaagagtatttccaataattttcaaatcttcttcctaaaaaaatctagaggctccgggagattcacctgaaccgggtactgagtgatgctttcttgggaaggcttgaaaccctgttgccaagcttgtacccaaattagagagcccataacaaaccatggtcccacattcaaaatgtgagatctctcttccggtgatgggcattttgtacagtaaaaccaacgacccagcgatgtctctatggcacctttccatgaccatagtttctggagttcctatttcagaaaatcttgggagaatgagcaccccaccactttgcttataatagcatcaacccacggtttaacaagctcaacatattggctctctgatattggtatgaaaacttcctcctcaccacaaggatgagggtgagaggttgcaaaaggaagcgggggcgaaggggaatattcaccgctatcttgaggtgctactccacctcactcctaattgcctctttgaatgacctacttttagacgaggttgcagaacggggggagggggaataggtggacctaggagaggagggagggactgggacgggacttacatcggcatttgctcgaacacaagggttttgcagtaggaggcttcgacatctctcctcgtgttctgtcgtgtggccgggttttggtgggttttcggtgacttaggggagagagaattttctctctctaagattctctctataattaaagcccattgatttcgtctttttgaaatgactattcttttacaaaattaaactttagtttatcgaaaattccataataccatttagttcacggagcttgggataagaacacaaaatgtacgggcatgggctagtacctaaactatcatatggaagatttgcatagcactattaggagcaaaggtggaggaaactttgggaaggcaggttctgctatccaggctatagaaactataaaattacttcacttgtattacacttattacacactctactaacctggtgactttttataggaaacaaattcagtttatattaatcttatatttagacattctcatattctaaatctcgctaaggagtctccaaaacataaaaataaggttatagaactatatatagtccttttgatgtggtactttctcgagcaactacatgacttcaatgaagaaagacaatgttatagtgtttggttgtcaaagttgctaggagggatgtgaatcgagctcctactactgtcaagtaatgtgtggaatctatgtccaatatcatttaattttgtaatttttggtttattgttttgttctttgattttataattttattaatagcctaattgaataacaagcaaattaaattagctgattcttcatgacaattattgtcaaggaacaattgactaaatattctctttcagacctcaaaaatacaaaagctctcttttaccacctagaattgttaattggttaaacatagtttcattgcattgctagattatagggagaaagtagtcatggctcctcaagctctttcacctatgtggagttctcgacgtcttaaggtaggccatctattaaataatcaaacatttattaagcatgtctataattttttgtgtacattgcaaatcaagtgtaccaagaactattttctcttttatatggagcatcttttgtttgccgctccattagaactacccaaatgagtaagtgtgctaaaaattatacttgctcctcctgtttttttttttttatctttctctcttttctatgcacatttttcaatatacatttttgaacttaaatatattttattatatattagtaaaaattataacgattgaatattaataatgtactaattgagacgaatcaaacaccaccccatatgactataattttcttataaattgaaaaaaaattgagaagattctctctaattatgaatgtgtcaagatgctaaatgaaaacgataataataataaaaaaacagagagagtacacctcaatatttgaacatttcttcgatgtaacataatcaccattttcaactcttgtatatgaaagacaagattacattgataagttacaaagacaaacatggaaaagattgttgaaaacttggttttataacatgacaatttctagagaattaccatttgcaacccccttccctatcgaataagacaagtttatcattttctcctctaaatttgtatgaaaaatttaaaatgtcataaaatggacttttatttcatgttatggcagatcatgatatagttttatcaggactcggcaggaggaatgataaaactatatcagatataggcaactttgcctatatcaccaatataaaattgaaaaagtaatgttgtgaaaaggttgaagtacaaaaataatgtattaaattcagaaaacatatttttattcaactttttgaatgtgagaaagggaatagaagggaatggaagggaatgggaaaaagtgacatcccctctctctctctcctacaattgatccgaccaaacagaaagccattctccaaaactccaaaattcttacaaataactttatttttattatggagagaaataaaaactaaattaagtgggaaattaaatgttgttgaattgtggaaaaaaggcctcgtcaatttagttgttttgaagatattgtggaaaatttggagaagaaaattggactttcatggaggtcgagagctaggagaagaatatagttttatcaggactcggcagatcatcgcgttgaaaattgaaatggacgccaattggaattgcaatcactgtcatggtcactcttctcatgtgggcttccttggtcatggaaaattacaatgctttgtgctcgtgacataatgtcgtagaaggcataatacacttttgtcatatttttgaaactttgatttctacaaaaaactctctagtctgctctacatttattcccagttacacaagtggtttcaaggaaactatagcaaattatatggataaatgtaaacagttatccacatagtgaaaatgtaagacttttgggacttgcaagatctctacaaaatagctaaaaatttacatagaattcttaagactgcaaaaataaaatgagtgtaatacttgatcatagtcatactattggagaccgtaaactaccaagctatatggattcttgtgtgaaacattcagagggtgtttggtatgataaattttgatgtaggaaacggattcaaataagtgtttccatttctaattgtttggtatgagtgttaagtaacaaatactcgtttttaagggaaacataatcccccatttattacccttatcaaactagtggaaacaaatcacgtttccttcctcaatcataatcctttcaattgtttccattccactaggataccaaacaacaattaaaggtaacagttattatttctatttccccccatttgaatctatagtacttgttttgtgtggagagatgctaacttatctttcatgtctttgattcagcttttagatatgaaacatatcagcaagtacactgctatgaaccattcaatggagatcgaagcgccacttaaatgtgaaacaagatttctctgtactattgttgtgcatcttcaccatagacgctaaattctctttcatgtctatatttccgctcttagcttcaaaatcttctatgttatgccaccaaaatttattgcaaaactgctcacaacaacatccatctcggcctttgctagctaactttttacacaagtactgcaaaatcaaaggaattcattgtagttttgcaagtaaacccaattaataagtagaattttatgctaaaaaacaataaaataacaagatccatctcaaaatcaccctaataagttccaatcaggtccaataaattctgtttagttcagttcaagaccaataagttcagctcagataagttcagttcagggttattcaggtgaagagaacgcaccctaagtttccaatgaacccacaattactatggagatgaggcactaatagtagccagctcaactctcagctcaaccacctaagattcttgtttatactcaataaaacttcttctatattgttgttgatgataattgatcacatttgatcaactaacaattaccctttattgctctcaatacccctttgatccgtctgaagatgctaaaatcctaacccaccttcctgtcataactccagtcccgattcccactctgtagactgtagtagcccatctctctcctctgcttgagaaccccgccaataactaattaaaatcttagaaaatcttatgtataaaacctgaaacaacagctaatctatagtataaggataagatcagtacctcaatcataccacgacaatagccaagtatagtcaaggtagttggataggtgctccaaactagcccattcacaaaagctgctgcagtttgttttgtgagatgattttgcctcgccactttaaggtgaacattgttctgttgggaaggccgaattgttgctccaaattcattgagtttgaattccaccttcacaattaatcaaaaacacagacaagtaaattatttaacagcaaatctgaatcaaaagttgagacatcaaatattgcactcctgtacctgtaccctggactgtatccatgagtaagttcttgagtcaaatccaaaggtcaaatagattttttgtcctgctatatgttccataaataccctaaagcggatgaaccaagatgtatctaactcacaagaaagacgaaaatgcaacttaacaaggcatttgtcagttggtaagttaagtttaagtattgatggtacttggtcccccttatagagcaactcccttagatttgggcaatcgataaaaaccttcttacaaccaaaaccacggtatttgaaatacctcaaattcggacaatcaacgtaaatctcgtgaggattaaattctatttctaacttcattagatgataattagctgctttaaaccaatctacaccaatattttttgtcacaatctttgctttctcaagaagtggaaaatcagctgtaagttcttcatatacgataggatggtctactaagtggagatccctgatattactaccaccatctgagttgaacaataattccaaatgagcagtacaagaaaaactctcaaggtttacacattctctgatgtcaacttcacaaatccggccacactgaaatccctcaacagaggctttctttagcttatgaaatatagaaagcgtgagagtttccatcccaaaagtgcaacctttaaactctaaaagttcaatcaatgggcaactacttgccaagttgcttatgctctcctcatccgacaccataacatgtgagagccacaagtgtttcaaagaagaatacatcccgaccacatagtttccaacagtggatgataattgacaatctcgtacagtaagagactgcaaccattttgaagaaacaagtatttccaggtaaggaaaattataaaatgtgtccgcacatatttcataccaaaaagagtcttttgtttgaacaaaaatgcacaactcctcaatcttagtttgtgtaactagattcatcaatcgatcaacaggagaaaactcggcattaagaacaaccagattcaatgttaattttaaaactggcgaatgttgttgctgtatagtcaacaagcgattattcacaaaattcatgaatctgtcccttatttcctggattttaggctcttgtccactttgagcagaaattagtagttctaaagcaaataaattctcatcaaaatgcaaagattgcaaaattttgtatgaagagcatacagttttccaggtcttggacagaacggatgtttgagtagcatcttttatgagaagaaatgatagtatatggtggatcatttcctccggcaatttcgaaatccggtccttgtgattgcatttatacatcttttcttttctttatgagattcttattcttcgacaaaacagatgttggacttggaataacagtatgctgcagctgcacatataaattacaccactaaagctatcagaaactgatcatcattatgatttatttatgaatgaggagatgaaaaatgctccttcagacaatttcacaaaaagacattaatctatttatagattttggttgaatgtacaaaccatctcatttcagatgtccaattttcaaataaacttccaacaaaaataaaactatgcaattgcccacacttcaaagggctttgagagccatatctctattattattattaatactccataagggaaggggagagctatggtgtccccatttgaagagactgatttagcctcctttcctttctaaattacaaaatcaatttctactaaaacgagacttcaaaaaaaaaaatgccggaaatacaattataacaaacaatgacaagttaactgaaatcaatagaattgcataattcacgttacaaaaatttaattacaaaatataacccattagtaatcacatactccctgtgtttctgtgctcgttttccaatgcacgtttttaaaattaaatatctttcattatatattagtaaaaattataacgattgaatactaataaagtactaattgttttttgcggatgttactaatgaagaggagaagtctgtttttttacgcctagctttatctatcaatctaaatttggctgcgtgttttattaagaaaaaggattttcaaaaagtgggtgagttgtgctctcttgttttaatgtatgaaactaccaatgccaaagcttattttaagagagctattgcagctttggaacttagccaacctgacatagcgttaatagaccttatccaagctcttaaattccacccaaataatggagaatttcaacaaaaattaaatgaaatatcgtcattgttaggactgtcttcaaattttgttgatactactgctaaagtagtcggtgaggatgaagtattaagtaactcttcaatcctcggaaaggaggagaaaaggagaaaggtaggagaacggaactcctacgaaggtaccactactatcacagtggagaagaatcaaaccttctcagagaaggtgaaaatgaatgttgttggaacagatcacaacattacagatactaatccagtcctagagtctacttctgggaaaaaaacgaaatctacatggtccaattttcgattttcaaatcggaaagcgcaggatacctatttgcgtatcaccccctcaatgtacagggtgatgtcagcggggagaactttgcattacctctgctcttcccaaaaccaaatgatcagcattcgaactttaaatccatcacaaagtatggattgcaacacgactatagatcaccatacacccatggagatgagacactcctttgttgaagggtatgagcagtgtaaacaaactccaattctagggcccgacgtcgaggctacaagtatggactctcaacagtcgtcttgcgtctctttgttagtacctccaagcacctccttttgctcgccgacgaagtctacttcacaggtcaacaatcagtctaccaacaagatgaaaatctcctctcgtttgcactccagaatcaacagacaacataatatggtaaagcgtcgaaatccctcgttttctaaccctttgttttgcagggtacgtattggagccaaaagaatttcatcctactttactgaggacgtttgctatccttgtaggaagaaatgttatgccccatcccccctattttactagctaatcttgttcaggatgatttccttatgtttggttagtatgctctctaggttgtaattcgatttttattaattcaagtttttctgatgtcaaaaaaaaaaaaaaaactaaattcatgcacttgatatatcttgctgcaactgtctcataaggatcttattgaagaacatcatagattaaaaaattgtagttactatctactcgaattgtttcgtagggctacttatatgtccaagtataatcaacttgttcaaagaaatgaactagactagagtgacattatttcaaaaatgacatacttcctctatttttttatttttttcattcgaaaccttgacacaattcatacttaaagataatcttctcaatttataaaaaaaattaatactttattaatattcaatcattataatttttactatatacagaaagatatttaagttaaaaaaaatatattgggagatacacacaggaaagtgagaatgatgaaaaacgaagagagtatttccttggggaaaaaaaaatcagtgacttttacccttcaacttgggctgaaaaaagggattaaactttccgaaatttttctctaacttgagaactgtagaaaacatacaccattgttaaatctttcatcatgcatgatgatgttttcaacaatcttataggctggttcaaaaatctaatccagtctatcctatccaaaaaatcgaaaattcaatacaatgtatcaagttacaattttttttatcgaaattaccccaaattataaataaaatacggtaaaaaatactctcaaacacaagtaggtagttcctacttcccaccacctccatcaagcacgcttggttacgtcttctttttctcaacatgtatatcattaaaaataaacttttatcatattaatatacttatatatcattaaatagtttattttaaggaggcaccatgcattatttttcgcattccttaaagtcgacaaactcgaatggggtgaactcatggagtttcggatcggatgtctagtaacccgatatccgaaaatatttctattcaataatttggattggatcaaatcaaagctatacaacaaacattagaagactaaaaatatgaattgtaagacgattaaagaaactcacctaattgacttccttgaattcttgtaatcttgttaccagggagttgggaagagtgtgattttccagaatggccgtaatatacagaatcactaagtagattatatctgtatatatatgactaggttttgacccgtgcaaatgcacggattttttttatttataaattgtatgacttgatgatgtttctcccaaaaattaaggggtgaatattagatcgtgatttaaactttttataatcatatcgtttatgaggaatattttaaaactgacttatcatccgtgcgttcaataactaatgtaattaatattatcgtgcggcgttgactgaaaaagtctttgctctacccattaatcatgcaaccacttcttttctcactttctgccgtccctactttccacagtccctctcatccccattcttttgttgtcttgagaccccgtgatctttatcacaaataaaatttcaaaccctaatgctggtaacttttgatatggctaactgaacccgtgcaaattacaaaccaaaaatggagatttaaaacatagctagaattgttatatttaattgaacctttctcctgaatttgggcaatatcatatttaaataaaatggagatttattcgaaaaattgctacattcgatcaattgaaccttatgttattaaagaaaaaatttcacgttcagttccagatttattcgaaaaaagttatccaaaaagtttgaccactgattcatcgaacacatttgatattttcaaaaatggataaaaaatgaatttgattgtgtttttatccattaacgtttgatgtgtgagattcagatgttatctatataagttttttatatgaagatgatgattcactttctagatgttcaaattgagatgacaaaatttttatgacagtgaaaactgagagttctaagtaagggtttgttacagtttaggactttattaacaaacttagattttgttaagattatattcggcttctagatagagtaagattctatgcacctctcttagaatttaaagcttgtaagtttcatactatttgacccatttgtttatttattttggaaagtaaaatatagaataaattgtattgtcaattatttgttacatgcacaattcacccttttttcgtttttattgtgagtttgtgattagctcactaatccaggtcaataatacttgttccaaatgaacggtaatatatacaaataaaaatcaatttatatgtggaaatatattatatgacattttatcttttctttgagatgaatacctagaaattatgagctctcaaatttcatatgtatggtaatattattttttttagttgtgattcagttgttgtgaataaactgaacaaatatacttctatatgacttacaaacttcacaaagatacaactacactaaaattatggacaataaatttcacataagttctatatgtaattttaatctttaaccttacttagagatgccatacatttaccagttaagatagcatattcctagcggactttaaatactgcgatgtgatattttgtacaatgaaaggggtctcattgttattatattaaactttaagacatcttatgcttgttattacaattaggctaccctcttttaagttttacaaacctcatgagccaagtaaaagttaacttttgttgagactttgttatcttttcttatctatttatatattggctaatccgttttttagttgatagtttaatattaggtgttagtacataagatgtttagacttttgtgcaagtattagtacataagatgtttattcttttgtgcaagccaagtggtagtacataagatgttcattcttgtatgtaagctaagtgttaatacataagatgtttattttttttgtgttatacatgaggtgctaacatcaattattattgattttatcgtgaatcgtgttttgtattgctaatcacattgtaactcactaataattatcatcgttttatgggatacactatagtctttgtaatatgacagcccacgattttatagtttgcaatgaacttataattttgatggtatggatatgtggtcaatgatcttataatttgaactttttaaaaaaaacctataatacaacttattgtataattaatacgtcccttggcaaactttaagtttaatattataatctgttaagacttttgttttaatttgggcttaagaagagagtacaacatgttcatttgaaatagttgtaataccttaagtagtacctaaaatatcagcttcttgctataaatttatttcttaattagtgccaaaatatatgattagtaactcaaatatcaaatttaggagatatgaatttttaattagtgcctaaaatatcggatttaggagatatattttttttggcagttttatgatgcataagtaattactaattaatagcaatctattccaaaaatttagttgatttacattccataacagagaactttcttaaatagctttccaattatatgcctaaaaaaataatgcataacagaaatatttaaagacaaatacacgtggcaaaaaattgtaaaagatattacaaaggattgacacaccagcaattcaatttactcttgacacataagcaaatccgtattgctttatagtattatatagatagaagtttgtctacgttaactcttatctccaatagtatcaacaggaaaaattataaaggataacttttcgggagcatatgtgccgtataggatcgccatgtcattaattttatttttctttttttcttttacaaaaatagagttctttgtacgtagatttaaatacatataaggagctttatataagcgaaaatcagaggttcgtgttaaatgaacaacttaaattattatattatgtaattggtgtatatcttttgctacgtaattcagaatattataatttttgtatcattggatagtgctcgaaatatgcatcgaaataagatctatatataggggtgaaagttattcggatataatccaaaatccaatccaatccgaattagtaattcggatcgaattcgaactgtgttcaaattggattcggaatgagattttttttgaaaaatcggattttcggatcggattggattgaggataattggatccaaaaatccaatataaccatatagtaatattccttgtattatgtatctggattgggcttaagtgcttaactgatttattttttataaaaaaacctactctatagcccaatacacatatcacttcaactcttcccctaaaacactaactccacttgattcctcgtttcctaaatctactaggttgttgttgtgcttaatttatttcatcgaaaaacaagagttctaaaaaaatcggattttcggatcgaatccaatctagagtatgaaaattcggattggattggatcggattcaaaccctaattggtttggattcggattgaaaaattgaaatccaaattttatttggatcggattggattaggccctaatccaaaccgcacaccggactttcacccctatctatatacaatatagttctacaacttatgaatagagcgcgccacgtaggattgtcatgttggatttaaatacaaataaggagcttgggataagcgaaatagagtttcttgttgaatgaaccactgaaattaattattatattctataatttgtgtataacttttgcttcgtaattcggaatattataatttttgtacatttggatagtgctcgcaatttgcttcaaaacaacatctatattatagttctacaacttatgaatagagcgcgccatgtaggattgtcatgtcattaatttttatttttatttttattttttacaaaaatggacttttacatagatttaaatacatataaggagctttagataagcgaaatagagtttcttgttgaatgaaccattgaaattattatattatataatttgtgtataacttttgctacgtaatttggaatattataatttttgtaccattggatagtgcttgaaatttgattcgaagtaaggtctatatacaatttatagttctacaacttatgaatagagagtaccacataggattgtcatgtcatgaattttcattttaaatataataaaaaaatagagttctacacatattgaaatatataaaaggagttttgaatagggagaaatttacatttagttttgaataaacaacctaaattattatattatgtaaattgaatataacttttgctacctaattcaaaacaatatcattttttacaattcgagaatgtttgaaatatgtttttaaatgagaacatgtgattataataattagatgaatggtaagactttttttagtctttatttttgataaatataataataattaagctataagtatagtgtacatacacgtgattatatcattttataatatgtccaatattatctttcaaaacctcagccttaattgctccactaaattagacatattattttcaaaatctcagctttaattgctccactgaaccaaaacaatgtaatattgcaataaaatttattgttacaacaaaaactaaaatctatagcgataaagttacaattagaattttggatggaaaaaaaattagagtttgatttttttttttaaaaaaaacccttagaatattatagagagctccatttaagcatgtgatgttattgtttttaattattaatttttttaaaaaaaaatagtgttcactatagatataaatacatataaggtgttttggataagtgaacattacattctgattttagataaacaacctaaattattatactatgtaaattgaatataacttttgtaagaaattcgcaatattataatttttttgccatcggagaatgctcgaaatatgttttgaaataagtttcatatacaatatagttttacaacttttgaaaatttatttatttggatgaaaaataacgcattatatattctttatcttaattacatgtaaaaataactatatataaaaatagcgtattgtatgtgggacaatatcaattatatctttgaaaaccatacttttaaaaattgagttatataaagataaaaatacatatttataattttgaacctataacataccatggtggcattacatgaatcaaatgaaagtttgtcaacgacattgcaaaggtattatgcaattcactaattattatattcatagagtatttattgtatacataattattcatgtttgttttttcacatatatctatatgtcagatcttattcttttctccatgaacttgattccactaaactaatttgaaaatcaaggttcgcgtttctagactatttgaggtcaagaaccataaaaaaaaggagaaagtttgataagtcttgatatggtcattatggatgaagaggtatatttttctcttaaacaatattttcgattactagtagaggttagttttatatttaattaattatatttatgataccgtcattatgatctttttttcactttctcatttttcattctatatgtgtatagtatttatgtgtcattaaaagttgaagttgtggctgacactcatgttatccaataatttttttgtcatgcatctattaaataaataccatctactttcttcaagtatggtgttcttcatgttaaaattgtgttaactatgttaatcatatcaattatcgggatactattttataatagacttagctacaatatttagtttaatattagaaaataaaagatttatatatcgcaataaaaaatctagaaataagagtataatgacaaatactttatttgttgtttttctacttcaataatgggtttgagcatggtttttaaggaaatgaaaaaatgggtagtttagcatagaggtacccctttaattaacaagtgtagggaataagtaaatccttaataaagtaaacacaattataagacaattttatgagtaattaatgatgagtttattaaaataaagtaaagataatattgtcaattatagttattttttttactaaaagcgaaatggtccaaataaataaaactacccaaagtggtgattattgcaatagaaaaagaacagaggaagtatgtcaataaaatggtgttgaaaaatctcattttacggcaacacaaaatcaacaatgttaataaaaaatttgaaaaaaaataatataaacaagaacccgtgcaatgcacgagattcaaaactagtaaaaaggatttcggtaaaaatatgtgtttttttttacagaaaaaatatttgtattggagataggaattgggaatggaaaaggaatcctaatttattgagtaacgccttggttgtactacatttcaccacttttaaccatccggctgttcaagaaattggatcaagttgatctgatccgaaaaatctgatatccaatccagcatatcttcgaaaagtctgattctagataaatttataaaaaaaaaaattagaaatataattatggtagatttgtaatgtatttcatgttgccttagatagtaaacttaattgtattaacgtttgcatattccattcaacttttttttattttgaggcactatataaggtggtcatgcagtcgtaaggtcatctaaaatcgtgaactgtcatgagtgtgatgattttatttgtcaagcaattttttttccgttcattgtgcttgacaaactcaaacagtatacgaactcattttagtatctacactcaatagcaccaaagacaacaaaagaaacttcattggaatttttcagatttagtatcttgttatctgattggaattattccgatccaagattttgggttgaatcagatatccgttttgaaccgccctagactcactaaatgacctatcacaatccagctgatctcacacaaactccacactatgagctagtctaatcatagacaccataccaatagtagtaaattaagtacattaattttgaccttcaatagacaatacccaacaaatcttgctcatgcttaaagattaaaaagatactaatctatttagacttaaataattcatgcaattgccttcatgttttttttggtaaggagaaaacaacctagcattgcccctataataggaccaacctagagcatcctttccagtgatggaataaaacacaatgttggaagaagaaaaccaatacaaaaagcgaaagagcctcgtgaccatgatgtgccatgtgaaaagcttcaaaaaccctttagctgatcataacaattacttgcatgatgataacattcatgtgttctcttcacctgaataacccttaacttatttgaatgagcttattgtacctaaattgaacttattagacatgattggatctgatttaacttattggacctgattgaaccttattggaacttataattggacctgattgaaacttatttgatccgattgaaacttattattatactttattggaattaattgaaacttattcgaccttattgaacctgattgaaacttattagaccttattggacctgattgaaacttattagaccttattggacctaattggaacttatttgaccttattagacaaaaaaattgattagttataacataaatgttacccctaacgtactaccccttacaatttattatgaaataatgattattaaaaattgctctttaaaaaaattattattattaattatctcttacgataaacaatttaacaaaaaaaatatactatttatatacttgtctatatataactttcaccagtaatatatctaatagtcttgttaatagtaatatgaataacaaaataatagacaataataaaagtataatactatacattgtggtactttaattcaaaaaatttaataataacataatcaactaatagtaatatgaacaataaaataatagacaataatacaaacatttaatgaaataatagacaataatacaagtataatacgatttaatcattgtggtactttaatttaaattctaataataacataatcaactaatagtgatatgaataataaaataatggacaataatatgaatgtttattgatcattgactatttggaccttattgaaacatattggacttgattaggcctaattggaatttattgcacctgattagaacttattggactttattgcacctgattggaacttattgcacctgattggaacttattggaccttattagacctaattgaaacttattgtcctgattggatctgattgaaacttatctgaaccaatctgatctgaactgaacttattggacctgaaacttaaattattaaggtgatcaagaaaacgcaccctaaatttcatatttgttgctaaatttcctattgacaaatttataaactattagttactaaacaagtaaatgaacttacttacataaatgagcaccatgaaatcattaaggctacgtttggtacggcgtaaaacatttttctggaacattgttttcttttattttatattttacattgtttggtttgcaaagtagcataaaaccatttttcctagaagtaaaattgctctaacaatgatggaaaattattttccttcgtttttcttatttctcctttacacacccttcctacctttttttcatttttctttcttttcatcagttttcttccataaaaccaaacaactgagaattaattttggaattgttttttccattataaaatggtttttatgaaaagcattttacaattaacaaattcaacaacctaattaaaaaaccatctaacaaagctttggaaaaaaatggcagtatgcacataaggtaagataacatgcacttaattccaaataaagactaagaattgttagaatttgagtaagacataataactcacctgaacacttgaagattttaattaataaaatcaattacttgtaggctgtagcacgtctcttgcctcttaggtttcgaattgcaagggttgtaaattcttcagtgatgatggagcccaatttagaatttattatttgattcttgaaatcaattgagtttgaaaataaaagaaagtcgaaactttacatgatttgcagaggaagggatatgaaaggttttatttttgatcataatactgggaaggtgggagagagatagtaggtttatgagtttttatcaaataaaaaaaaattgaaaaacctcatttatcttttacttaacgtcaaaagatgttaattgtcacggtaattataattttaaaaccacaaggtcacattgtggaatcaatttttttttttccaccatctagaatcttagacccttaaaaagttggaagttgggcactattcatttcaatagtgttatgggtgacaaaaccatgaaattcactattcataagcaaccaaacatctcagccatccaatcttcatccaatctcagccatccaattattctcctccttacttcagtcatctcctttctctctgactctgtgtttctttccagccaattctctctcctctttctctttgtttctctcactctttagtcaaactttttagggtttgatattgtgggaatttttagacattcatcaatggcgaaaattagggatatggatgaggatatcaaggatgttttcgctgagtataattaggtattgttttcatctctcttttttttttttttttgaactggcactcagaatcaatgacaaaactctgtttcagctgaagccgaatcattcaacaccgaaagcctacccgccggtgatggtcgagaaggagaagcttcaacgacgttgtttcccggttcacaggtaactcctttcccctccttttttttgttctccttttaccattctctctctcattcttcttctattttttcattttcttacccattttttctttctccaaaaccagacctacttgctttaggttatgtttttcgccatttcatcatccattttttcgttattgtttccactttttctccccctaaattacggctccatttctagggttctattcaattttcgccatgttttctcttacaatcgggtttcaatttcttcttttcgttcatatgtagttctaattgaggaccaattttgattttttttttttgcattgaatttgagagtttttttgggtgattgactgatcaagaggaggagagagagagagggttgtttgaatagatgatcgttggagttttttgtcctggaaaaatgagtgcgtgttacagttggtgatggtgtattatttgtgtataactttgaaccttgaaattacagttggtgatggtgtcgttgatttcttacagcagcaatgagtctgtgaggtaagttaaacattagaattgagtctgtgacatctaattgtcgtaatgttgaaaagaaagcttagcatcttgattttatgtatgttctggaaactaacgctggttattgggtattctatatcccttctactaaaaggtgcagtgctgtatatttaaatgaacttgcaatgtggtatttttctggctttcactaatcattttctttgctatctgcaatggttcaacgtaattttttagttcctgtggtctatggatggtaatttgtacctatatattctcatgctacttaatctaaatccttctttccttttgcccgcgctatcatataatatctcttttttccccctaatttgtgtcattttgaactaatcaagtatttttctcttgaaagaggtggcagtaaaatagcttgtttgacccaaatttggttactgttattctagcctttctgcactcccacatttaaaagatcagaggaggtattgactttagactctcattgtatcgtgcagatcattgaggcattccagaaatatcatgcagatcacccttttggcaaatttttcggcaagtgcattgagctcaaaattaaacttgatcgctgcttcagcgcaggaggtaattactctccatattttatgtatataaaagtcttgaacatctttttctttgggtgggtgaatgtattggacttttatggtttgtagtgattttttgctgatttggacttcatagatagtttaggttactttaatgtggttacaaaaattttgaaattgaagaaagaaattagtaaaccgtttaccagaggacaataatttcaacgtgattagtttcgccattgttggtgctatgattctgtaacagaaggattttcttgaatttggtgcagctttgcatattctcacagaaacctttttggtaagaatcaaaaagtaaacgtctcacttgagaggggacggatcgactctatatttcggataatttacacagtcccatggattgaaggtgatgataagcgtactcaacaatcaattatgattcaggtgataaagctactcttcttgtttatcttatcagaagaaattggtatttgcttatcttgctaagtttatttggtcctgtgattattcctggtcctccagagttcaagaactcctggtactttcgtccatggtaatcaacccggcaatagtaacataaccattggccgtgtaacagctggcattgaattcagcaggcctataagaccaaagtggagcggaactgctgggcttacatttcaggtatctttaattagcttcttttatgatccttttcttgattgccaaaatatgttatacacaactttttttggttaaaatatatggaaaaatcgttgtctgataattgagttaaagtagtgttttctgtttgtgttgttaaccttcattaacttgacgttagtttcccattcatgttattgcagcgtgctggtgttcatgatgaaaaaggggatcaaggatttctatagcagtcctcttactgcgaggtatgcactgttgcatgcatcaacttcttagcttaaattctgaagctgtactcggatacttcattgaattcaagtatctgtttcggttctttttttttatactctgacatggttatggacacttcacattaaaatttgaaccaaaattatggcaaattttcttaaaatagccgagtaggacatgtagatatggaaccgtgtccaacatggatacccaagtctaagtaacagctttttttaatgcgctttttgctctgtcttgaatttcattcctgtttcaactttctatccttgtttgatgagcatttttgttgtgctcagtgggaatactcatgataatatgttgcttttcaaatgcgaatgtgcctacactggtgatttaggatcctccatggttagttatcttttgatttagaaactaacttcatcggttcatctgttattttcttgtcactcatatggttcattttgcagttggtcttcagcatggaacaaggtcttcccgtcttgccagagtttggacacctaatctaaataaaggtgttggggatgaataaactggaccgtccctgactgtcttctctgtttcaacaatatgattataataacgttgcagcgtaaatctcttcatgttgttggtacgcttctctctatctttcgttactacttatttacaattttaacgaagttcttaaaatttagcaaagatgaaattcaagattcgaagaaactctgattattgttggtgaaattgggtaaaactacttaagtttttatctttatgatttaagcattaggattagaaatttgtaaacaagtttttttttttgttgaaatattgcattttacagaattgtgtgcttcgaaattaagagtgaaaaatatatttggagaatgaatgtaggagttagagttgtttgtagctgaatttgtgttggtttttgaacaattatgatccacaaaattacctctgtttttgttaaaagccggattatgccgtcaggaaaataaattgatcggggttaaatgactccatgctcccttctctcagaaagttaagttcgagcaaaatcaagatatcatgaaggccagctttaatttttgcaggagagttatacaatactctatgatcaaggacaaacctgaacttcctttttctataaccttatttgtctacattcagctagcttgtgaagagaaagtatgctattatcaagtagtttagaccaggaaccatttctgtattacacttatcatcaagttaaattaactgatgactgcaatgtagttttccttatctatctatagagttccttcacctgctatttaagctgtggtgaagtatttttctacactaatatcaaacacatgaggatattagatgcttatattaaacataccacataagccctattatcactaatattactactatacgcagttggcagcgatgaagtttctgttttgtaaattttcgtacacacaaaggaattggaaagattaactaggggaaaaagatcaagatcagcaactttttagctgcttgcttaccaatgagatggaagtgaggttgttggtggtgttccagaggcagtatgtggatgaagatggtagcttagaatgttgagcgcgagccttttgctttagaatcaatagtggaactagcaactcaactgcaaactgaattgtgtttatgtttagggtgacaagataaaataattttccccacacccaaccaaagggaaatttatctttaattgtgtttccttctgaaaattgatttccttggaaaattaatatccattgaaaatattttctgccaaactaaggtgagctctaatcttgcaatttcttttcgatttaagttgacattcctacatgggttgcaagaaccctgttctaatttccagagctgtaacctacgatgtttcctttctaatttatgttgtgtgagtatctggagaactcctccatatatctccttgaactgatttaagaaaatcaatttgatcatgaactgaagttatctaataagtaattttctaacaaatttgtctgagaccatgatcccccaaaagccttaaatgtatagggctgtggaagcaactcctatcttccatgtgtgtgcgtgtgtaatatattacttttaacgattgcattgttaaaagttttataataagatggttgataatcaaaaaaggaaattaatcttgaagaaccaagaaatattttcatctgattgttttgtagtgaattgaaattcattctaatcccggaaattcattctaatactttcaaggccgcatattgattttatcaagaaacctcgaatttcatttgggatttcattcaattaactttatgggttttcgattttggttcgttttttgcaaattatggttcataccctctccttctcttcaattgtgttcatttttctccctttttgcaggaactggtatactttaaaggccgctagaaatggattagctgatgatcagttggaacaaccaaagaattaaagatacccaatttcttctctctttcttccacttttgcacgtttcatttcattgggtatcttactttatattatcatcacattttgctcaaattctttgcgtatacttctggaatcattctatcaacttttgcaagatatcatctttaactttttttttgtttatgtttatgattgtttttctcatctgggtatttcctgttattttggaaaaagcttgctaaaattgggtcgaattgaatttggtgagatggtgaaattgccaaatcagctcgaaaaagtaagtttatctgtgggttactcgaactgcatatatgagaaagtatagtcgtacatgctggttagattttgatgctcaaaactgtgaaattctcttcaggcaatgtctcattatgggtatgagattgttcaaactctgattgtgattaagggttgtcaatgtttctcattatgggtatgagattgttcaaactctgattgtgattaagggttgtcaatgtttctgacatattactataaagtaggttattgtggttacgtatagttattagtgcaaaatgtttagatcaatgtcttagaaactcagatttaatctaatacatataaatccctatcctgtattaattttaatcaagtgaagcaactcaattttaatttcgcaaaatttgtatagaatggctattattacaagtagtaccaaagagatccatattgactctcttggaggtcatactctcacagatcactatttcttttcgtgtccggattctcaaatgtttcatgatttgaattaatttactgcctgatgttgcttttcttaagcagtgtaaaactaatgttccttaatacaggatgtttagaactaatttaaagcgttttattaagatgagatgtttctgtttgattctataagacatcaatttccctgcttaattatgttttcttgtggcctctagaaagttttattatgataaagttgttaattttttatggcactcatagaggtctcataacaagcttaaagcaggtttctatgttttaaagatcaagcaacaaatattagttacctaagctcccaaatctaacggcaaagttctacgtttataaataaattctgtagaagcatccttactgtttcatgagcattaggttaacacttttcttctacccttgaagtcccttaaattcgtctacatttttctatgtttcttctctaaatttgtttgaaattttattattttatatgaacaaattccgcaaaattgaagaacaacaatagatcaaggtgaattgaaagaaggcaatgcataaacatgaatataaaaagaaaggtcttctttgctaatataataaatactcatgttaaagctcttaatgtgggtttttcgtggttaaccttaaagacactatcttactatttacttagcttatgaggaaaaaaaagggacaagagagctataatggcaggaaaggagaaagtgaaaaagaaggaaataatgatagtaataatagtaataataccaataataacaatattgtaccgaaatgaactaaactaaaaataaatccaaaagaacatggcctagattcgtaggaccacaagatagtttgtacaataaaaggttaaattttgtcgtgaattttactgcacagaatgtattgacaagagtaaataacttcactggagttgcatacaaagatgatcctacaattatggcttgggagcttatgaatgagcccagatgcccttcagatttatctggaaaaattcttcaggtttgttcaaccttcctttctcactttccagtactactttcttttctttcttcttttattttatccttgatgtgggaagatgaatgtcattatgtcaacctgatttcaggtaatttgtactactatgtgtaaataatgcttttctatttcaaatcacatttaggcaatttctacaattctaattaaagagtgtagcacaatcttgtgtgatatatatatatatatatagccaaagcctagcatgtcactttcatagaatcacatgcatagacccaacattaatgcattcttcctcttataatgttattagcctttgagttaggcatgtaacctatgatcttccaaccattcaaagaaaggctgacatcatgtacttgctgttacaccattaagttgtaacgtgaaggaataacttcattcctttttgcaacattgtggagtgggtctgtgggtgggtgttgtttcgggcgaaactttcgtgtaaccggtgtagggatatcgtgggtatattggagaacgaattttagtgggggcagcttaggatggcgcggaaaaaaaataatcaaaccaacgattagactaccctagggcataatctaatctccccttcgatgttcaagttagtaaatatttgaggaataagtctaatgagggaaatgagagagagagagtccaattcaggagttatacatttatcagattcataaataggaatatgattatagcaatcgaagtgagtgacgttgtgaaaggtgtacgaaattttacttgaatgggctggcatccaaaggtgcttggaccttgccttacctcgggggtaacttagtaagcctagagcaagttatcattggcccaaacaaatgtatcatagcaaactcatgatgatgggtatttcttgtattaggaagttgaaattgactaattcgatgcttgtgtatttagtcatcttttgatggaagttgcccaattttcttttacccattactgcactatgtacacaacctcaaatttcgtcaaagagaatttgacgatcatttggtttcgctgcaactgctatcccgtaaaagagaatttgtgcctatttggtgtacggttaaggataatggtgataatgttgtgtgtaatttaaataattttgtaagaaaattgtaatgccaatgttctaggaaagttttttccatttcaagtgatcttgcttctagagtctgtaactctgtacaaccaaattatatgaactttgtaggatcaagcattgttaacttcaacttaatttcattcaaatcagtaaaaattgcataaaatacactagagaatcagttgtaatcagtttaaatatatataaacaccaaagatcgcttgaacaaaacttgaatctaaactaattgaagtgaaggaataaaaaagagttgcaatattttatgcatggtcttttccccattttcaggactggatcactgaaatggctccctacttaaaatcaatagatgcaaatcaccttctcgaaatagaattagaaggcttctatggagatgataggaagcaatacaatccaaacaacatccaagcaggaactaactttattactaataatcaagttccttccatagattttgctactgtccactgttacccagatcaatggtaagtctcttctcttcaaaatcttaataaaacaatcaaaatcccaaaaactacgctttttactaacctttttctacaggctatctggttcaactggcgaagcacaactctcgttccatcagtagtgggtgcaacaacatattttggactcactaaacatccttaagaagccagtagtatttgcagagtttggtaaatcatataaagttgcaagctacacctcatctgatagaaatcaactctataatatcacctactcttccatctttctatacatcagcttgcgaaggaagaggggcctgcaactgatgggttgttctggcagctgttacccaacggaatggacaatttccgagatggatatgagatagtgctaggggaggaacctaacattaccggaataatttccggacagtcaaagaaactttccagattaaacaagcacgctcctggggaagcaaggagctgatacaagtcattagtgtgtctagctagggaatatattgacgttttttttgaagaaagctactgtaaaattttcatgtatatatacagacatgagggaacctcctggtttaggttacatgaaatcgtaattgtttcgatgttgaaacggccttaatcacatctgtgcttgcatttctgtgtgtgattgaccttttatgcattagcgtctccccaaatttgaacttattcacacgatatacaagtccggaaactatgctactttgaggttggtgcttgacagcagggtatgtgtttcccgagttatagaagaaatccagcctcgagaagatgtcagaccccttaatatcttgtggtactctatatccaatacccttcatgatttcaacccctctcccttttaaaagcacaagtatagattatgtatgataggggcatctgttattggatcaagttctacaatctcacttttatctgtgttcagcttaatagtggtttaaagcgccaaaaaaaatggttagtatatgcaagtggttgttactgttgttagggataaagcatgtgctttgtgaagcttgattcttttgtaatagaaaaacgctttgttttcctagagtttaataggatcagttttgatccttttgtattggaaaaatgcttcgttttccaatagttcaagcagatcagtcatgtgatattagggattctattaaacttactcatgttttagaaaaatgcttcattttcgtataattgaagctaataagttgtgaaaatttgtaatcgtctttccctttttttggggaaaaaatacgaagttgtggtagcttttcctactaatttgtcttgcttagtttatgcttctaaatcaataaagcttctatgtaatttggttcactaaatgaaaattcttatttggtatcaattttctctatttggtgctttttgtaaaaagtattttgtttattctatatctttggtatcttacgtaatcaagtgcttttctacattaaattaaaattacaagtgcaagtatcaaaaatccaagaacaatagcttcatattcaatatgttaattatatctactaatttgagtatcgcttttacgccatataagttgagaggtaaatgattgtttttctgacaataattgtatcggaattcaaattgcaagcaactgctattagtgcgaggaattggagatcactttaactttatatcaaatttggggattttggtaaataaggactttgatcgtaggtcttggcaaattttgtcaaatattagtgtcgtacgacacaacatcaacacgaaatacaggtcaacgcaaatatcatatatctatactcttaatattcgctaataataactggattttgtcatttgcaacaacactagggagacactatctagacactacttgaagcctaaagtatatgcaagctgcatgaagtggtcgatccttgctaaaaagaaaagtgagtcttgatgccctgattgcgtaggccaatctattagactattagttcctctatggctaacttgaatcatgagatttagagcgaaactatttggattttggatcaattttcgaaataaaatcctaccatcaaatatatattcgtactttttcttatttatgtgatgtgttatttatgtataatctgacttcgactttcagccaattgtattatataagatttccctatagaaaaaatgattgttaaaataatagtaataattagattatttgtactatataagatttccatatgatgattagaataaattataatgattaaattattgtattatagaagactattctattataaaaaattggaagaaaaataagtcggatcaggttcggagtcggatgttcgaattttaagtcggatgtccgtgattttaagtcgggttggatctcggagtcggatgttcagattttaagtcggtcggattcggattttcaaagtcggagccggactcagatttaaaatccgactttttgtagggccgaagtcggattatgcataatccggtccaagtccgacccgttgccattcctaacctaaaccttagatttctcaagagtcgacgctcaaatttccaactttaaatagctagagataaggaagatacatacacttacggaaaaaggtagaactacgttataaaaaaggcgatattatctagagcgagatttggtttgtattactcaaaatttatgtttttgtgtttaacaatttaaccatttgggaaaactatgttttttgtgtttgattttgggaaaacaatttaacccttgctattacaatattttggggtagcgtgcgcgtagcgcgcggtacaacaactagttttacaaaatttagggtcaccatctagaatttcccaaaaatttttacacccagcccttatctagtggtagaataagcaatagtaagtgtctttctgtaagcacttataaacaaggagcaccagtggtctagtggtagaatagtaccctgccacggtacagacccgggttcgattcccggctggtgcaaaaattgttagagctgtgatgataacagggcgcctctatgtggcagattgggtccgccaccaaacgtctgattcctcggacgaagctagagcgcatctgagctttgaacttttttgttcttgtttttaaatgatttgagggacaattttttttgagtgatgataataataattgaagtggtacaaaccgaaaataaaagaaacatacaatcagctttttttttaccaaatgtttttgataccttttgcccagaagaaaattataagagatttcgttgaattcaagttctcatagcttaagtaggagaaaaataatctttatacggtacattatgttgtgactagaattgtagcattaatcttcacattggccaaacaagtaaagaaagtaaccttttaaagataatcgtcattagccaactgtaaatataaatcttatacttttatcttttttaaactacaaatgaaaggcctaattaaggaaattgtatagggcccccattatttttgctcatattttccccgctcttgaaaattatatttagtacacctcaatatttgaacatttcttcaatgtaacataatgaccattttcaattcttgtatatgaaagacaagaaaacattgataagttacaaaaacaaacatggaaaagattgttgaaaacttggttttataacatgacaatttttagagaattaccatttgcaaccccttccctattgaataagacaagtttatcattttctcctctaaatttgtataaatggtctaaatttgtatggaaaaattgaaaatttcattgaatggactttcatttcatgttatggcagatcattgcattgaaatggacgccaattggaattgcaatcagtgtcgtggtcactcttctgttgtgggattccttggtcatggcaaattacattgctttgtgctcgtgacataatgtcgtagaaggcaatcaggcataatacacttttgtcatttttttgaaactttgatttctacaaaatactctctagtctgctctacatctattcagttacacaagtggtttcaaggaaactatagcaaattatatggataaatgtaaacagttcttcacatagtgaaaatgtaagacttttgcgccttacaagatctctaaaaaatagctaaaaacttgcatagaattcttaagactgcaaaaataaaatgagtgtaatacttgatcatagtcatactattggataccgtaaactaccaagttatatggattcttgtgtgaaacagtcaatggaaatcgaagcaacacttaaatgtgaaaaaagaatccatactacttgttttgtgtggagagatgctaacttatctttcatgtctttgattaagctcttagatatgaaacatatcagcaagtccattgctatgaaccattcaatggagatcgaagcgccacttaaatgtgaaacaagaattctctgtactattgttgtgcatcttcaccatagacgctaaattctctttcatgtctttatttccgctcgtagcttcaaaatcttctatgttatgccaccaaaatttattgcaaaactgctcacaacaacatccatctcggcatttgctagctaacgttttacacaagtactgcaaaatcaaaggaattcattgtagttttgcaagtatacccaattaataagtagaattttatgctaaaaatcaataaaataacaagatccatctcaaaatcacccctaataagttccaaccaggtccaatatttagttcagttcaagtccaataagttcagttcagataagttaagttcaaggttattcaggtgtagagaacacactctaagtttccaataaaccctcaattactatgtagaagaggcactaatagtagccagctcaactctcagctctcagctcaaccacctaagattcttctttattctcaataaaacttcttctatattgttgttgatgataattgatcacatttgatcaactaacaattaccctttattgctctcaatacccctttgatacatctgaagatgctaaaatcctaacccaccttcctgtcctaactccagtcctgattcccactctctagtagcccatctctgtcctctgcttgagaaccccgcctcagcagtcagcagccagcttagctttcggactgtaatacagtggggggtggagggtggcggcaattcggagactcgaaatatgttgacagtgtttggccccaataactaattaaaatcttagaaaatcttatgtataaaacctcaaacaacagctaatctaaatataagggtaagatcagtacctcaacaataccacgacaatagccaagtatagtcaaggtagttggataggtgctccaaattagcccatctacaaaatctgctgaagttcgttttttgagatgatgttgcctcttcactttgaggtgaacattgttctgttgcgaagggcgaattgttgctccaaattcattgagttcgaaatctgccttcaaaattaatcaaaaacacagacaagtaaattatttaacagcacatctgaatgaaaagttgagacatcaaagattgcactcctgtacctgtatcctgttctgtaggcttgagtcaaatccaagggtcaaatagattttttgtcctgctatatgttccataagtaccctaaagcggatgaaccacgatgtatctaaatcacaagaaagactaaaatgcaacttaacaaggcatttatcagttggtaagttaagtttaagtattgatggtacttcgtccccgtcatagagcaactcccttagatttgggcaatcgataaaaaccttcttacaactaaaaccacagtatttgaaatacctcaaattcggacaatcaacataaatctcgcgaggatcaaattctatttctaacttccttagatgataattagctgctttaaaccaatctgcatcaacttcttctgtcacaagctttgctttctcaacaagtggaaaatcagctgtaaggtctccatatacgataggggagtctaataagtagaggtccctgatattactaccaccatctgagctgagcaataactccagataagtagtacaagtaaaactctcaaggtttacactttctctgatgtcaacttgacaaatccggccatactgaaaaccctcaacagaggctttctttagcttatgaaatatagaaagcgtaagagtttccatcccaaaagtgcaacattcaaactctaaaagttcaatcaatgggcaactacttgccaagttgcttatggtttcctcattcgataccaaaacatgtgagagccacaattgtttcaaagaagaatacatcccgaccacatagtttccaacagtgaatgataatcgacaatctcgtacagtaagagactgcaaccattttgaagaaacaagtatttccaggtatggaaaattataacatgtgtccgcacatatttcataccaacaaaagtcttttgttttaacaaaaatgcacaacttctcaaccttagtttgtctaactagattcatcaatcgatcaacataagagaagtcagcattattaacaaccagattcaatgttaattctaaaactggcgtatgttgttgatttatagtcaacaagcgattattcacaaaattcatgaatttgtcctttatttcctggtcttgtccagcactttgagcagaaagtggtaattccgaagcaaataaagtctcgtcaaaatgcaaagattgcacaattttgtatgaagagcatacagatttccaggtcttggaaagaacggaggttcgaatagcatcttttatgagaagaaatgatagtatatggtggattatttcctccggcaatttcgaaattcggtccttgtgattgatgtaatacatcttttctttatgagattcttgttcttggtatcttattcttcgacaaaacagatgttggggtaacagtatactgcacatgtaaattacaccattaaagttacccagaaactgatcattattatcagatttatttaagaatgaggagatgaaagattacacacttctttccacaaaatgaaaaaaatcagttgagcaagaaatatattaaaatcagagctatacaacaaacattagaagattaaaaatatgaatggtaagagaattaaagaaattcacctaattgacttcgttgaattcttgtaatctcgttaccagggatttgggaagagtgtgattttcaagaatggccttgattgtactacagttcaccactcttaacatatattcggtccggcatatattcgaaaagtctgattcttgacaaatttagaaatatacactttatatggtaaatttgtaatgtatttcatgttgccttagatagtaaacttaattgtattaacgtttgcggattctagtgatggcgactagtccgggctggcagaccaaattgtgggctgtagcgggctgggctgagattccatggtccaggattggactatgaaattcatgtgttggtcgggctagttcgtgggctgaaaaatcttgactcacaccgatcagttaccggtttccacggttcgggaagcgattttggcagttcgtgggtctagtaggctggatcggggtagcgagccgacgtgaattttttttcaaaattatttaatcattgaaattattcgttattgttacataaaatctttaaaatgacataaaatatacttcatccgtttctaaataagtgcaacacttcttgttttcacgtttgtcaatgcattattttatccattaatatcttcaattatcaataagtaaaaattataaaaagttgatattaaaaaaattcacattcgacgaatctaacaagatcccacatgactatgtttttcctaaaatgtaaatcatcaaagctaattaaagtttaaactgtgaatagtaaacactatgcaaatgttgcacttatttagaaacggaggaagtatacaattattaatattaatgaataatttcattaattttaaatttgattgaatcataatatatacaatttgattagaatatatacaatttgattaaaatatacacaatttggttcaatatttacttggactagactgggttggtccgattcatgggccgggctagacagttttagtagcgggttgtgcgcaaaaaaatctggtcatgacccacccacccatttaaaggtttgagctaggctggaccgggattttcgcgagcccgacccacacgacccacgaggtgggctgggctggattggcccgcactgttggccatatctagcggattccattcaaccttttgattctgagccactatataaggtggtcatgaactcataaggtcatctaaaactcgttaactgtcatgagtgtgatgattttatttgtcaagcacttttctttgcgttcattgtgcttgatactcaaacagtatacaaactctttttagtacctacactcaatagcaccaaagacaacaaaagaaacttcattggaatttctcaaatctgggatcctgttatctaattgtaattatttcgatccaagatttaggatcggatcagatatccgatttgaatcgccctagactcactaaatgacctatcacaacccagttgatctcacacacactccatactaggagttggtctgatcgcggacaccatatcagtagcattaaattaagtacatcaattttgacctccaatagacaatacctaacaaatcttgatcatgcttaaagattaaaaacatagtaatctatttagacttaaataattcatgcaattgcgctcatgttttttttttctttttgataaggagaaaacaacctagcactagccctataataggatcagcctagagcatcctctctggtgatggaaaaaaatacaatgttggaagaataaaaccaatacaaaaagtgaatgagcctcgtgaccatgatgcgccatgtgaagagcttcaaaaccctttagctaaaattagatacatttcataacaattacttgcaagatgataaaaatcatccattaaatcttagatttaatttcttgctaattattcagtctatctgaatttcctattgacaaatttataaactacagttacaaaataagtaaatgagcttacttacataaatgaacacctttttttatattaaggctacatttggtacgacgcaaaaatattttcctaaaaaattattttcctttattttcaattatacattatttggtttggaaagaagtatacaaacattttccctagaagaaaaattactctttcagtgatggaaaaaccattttcctttcaaaatgaagggaaaactggttttccttcatttttcttatctcttctttacacacctctccctacctctttactttcttttttatttttctttcttttcatcatttttcttccatgaaaccaaataacggaaaactaattttagagttgtcttttccattgtaaaatgtttttcaggggaggttcttggcccatgcagtataggcgacggaatagggccccaaaaatagaggggccccgaaatatatgatatgtattaaatggttgaaagaaaaacaaaaggaaagcatttggatcagtggtaaagtggtagagtatggggaaggggcgcgggttcgactccggttagaagcagttttttttactttttgttctttcgactgcagactcagcagtcataacctactcacattaataccaacgcatgctttttttctttggcgcttcaaattcccaattttccattaatgattactctctcctctctcttcctaactctttctcattaatttctattcatactcttatatttttttgcaattttccaataaaatttactcttaaacttcaattcaacaaatttgccggagaagttcaagagatgtatggttttgaattgtattacaatggtttaatcttcacttatttcatgaaattgaagattaaaccttcatcaatttatatagggacatcattctcctccctaatttccctatataagcaactctcaagacatgcaatatgtaccaagcaaaattcagcttatcgaaatacaatgctgtattggtactctgaattctaatatgcgccattcacctccctaattttagagttgtcttttccattgtaaaatgttttttatgaaaagcatttttacaatgaaaatgttttacacccaacccttatctagtcttttaagaatttgataatgcttccttttatttgaccacgtaaatttaatttgggcccactaaaccctagatctattatattacaattattcatggtattcacaaaaaggtctgccctacttattacccaaatttctcgctttgattgacgacttcatcaaagtcatcccccaacaagccaaggtatttcaaattatgagcaaatctttcaaggtcgttccatagaagcttcctattctaaacttagtacttgcataaattgaagtaaggacaaaagaagatttagtagatattacctcaactacactgtagactccccgtgcaacttctccaatgacttgcaaatccaagatgtttgatttccaaaaaagaagaataacgcctgtagaacccattggttcgagcaaatgccaagtgtcatagctaagatccctaatgatcccagtcatctcttccctgcccacaagtttcggctaagacaagcaacaacgggtagttttataaggtcatatataacttatgaactatcatgagtctgatgattttatttgccaagcactttttttgctgttcattgtgcttgacaaactcaaatagtatattaactcattttagtacctacacttaatagcaccaaattaaagacaacaaaagaaacttaattagagttttttagatctgtgttatctgattggaattattccgatccaagattttcggtcggattagatacctgatttgaaccgccccagactcactaaatgacctatcacaacccagctgatcttacacaaactcaacactaggagctggtctgatcacagacaccataccagtagcagtaagttaagtacattaatttcaacctccaataaacaatacccaacaaatcttgctcatgattaaatattaaaaagatactaacatatttagacttaaataattcatgcaattgccttatgtttttttttttggtaaggagaaaacaatctagtactacccttataaataggaccagcctagagcatcctttccggtgatggaagaaaatacaatgttggaagaagaaaaccaatacaaaaagcgaatgagcctcgtgaccatgatgcgccatgtgaaaaaagcttcaaaaaccctttagctaaaattaaagatattccataataattacttgcatgatgataacatccattaaaatatagatttgttgctaattattcagtctctctgaatttctattgacaaatttataaactatcgattactaattaagtatgaacttacttacataaatgaacatcatgaaatcattaaggctacttttggtatggcgtaaaatatttgcctggaaaataattttcctctattttcaattttacattattttgtttgcaaaggagtgtaaaatcatttttcctagaactaaaattactcttccaatgatggaaaacaataaaaaattattttccttcatttttcttatatctcctttacacacctcaccttacctcctttctttatttttcatttttctttcttttcttcagttttcttccatgaaattaaacaacgaaaaactaattttggaattgtgttttccattctaaaatatttttcatgaaaagcattttacaataaaaatgttttacacccaacccctatctaatctttcaagaattggatgatgcttccttttatttgtccaggtaaactctaggtctattagattacaattattcatggtattcgcaaaaaggtttgccctattctagacacaagtttcccctaaatttctcgatttgattgacgacttcatcaaagtcacccacaacaagccaaggtttattcaaattatgagtaaatctttcaaggtcattccatagaagcttcctatttttaaacttagtacttgcataaattgaaggacaaaagaagatttagtagatatatattacctcaaacacgtcgtagactccctgtgcaccttctccaatgacttgaaaatcctcaaagaagaagaataccgcctgcaaaacccactggttcgagcaaatgccaagagtcatatcccagatccctaatgatcccagccgtcttttcccgacacacaagtttcggctaagacaaccgacgacgggtagtgatgttgttgcatgagaagcctaaaattaggcttaaaggagggcacgacaatgcctctaacattccaaaacagcaccgtcattcccttgtattagtggtgctttttcaaggagcatcttgagtatcgcctcattttctagtactcatgggtctacttcgactccggattgtgggcatgttcacatctttctgtgcggccaaagggctaccttggcctcacatgagtttttttttatgtcgcttgcttctccctaagtcgtcgttagtcccaattgttttaagggtctgtacaggcgtgttaagagcacaacattggtgttgctcaaaactatcatccgcacctctttctaccgaaccaagatcatggtgcggaccatcaccaagagtagtattggatccacccacgggtctaggttggctaagaactctctttcttcgctctctaatcctccctctttctttatattaggaacaatttccagaattttttcatgaaagggggaaaatgagtggcatctcgaatttgtagcacatgagctgggagaaactaggagcatgaatacatcatcaagtgacctagtttttttttctggtgtaggaacggtttggctgttagcactttcacctcttgccatgcaagttccgtgtggaactcgttcgagttcccggacaatccgggagataaaaatccattgcttccataaacaacttcgattttaggggtcttacttaccaagagaagcaaatcgggtcgagggttttcaccgaggatatcttcgattctggtgggggagtttggaggtggggatggtggggaaggggggaaagatctggacaagtcgagatactctgggtctcttagcatcatcacggtggagctgagttgtttgagctggggtggtttttttagcaaaggctttttgtgaacaaggttggctgggttttgaaacttccatggcagtaatcatgtggttagggggttatatagtgggttagagttggagactagcttggcaggtacaatttgcaagggaatttgtgtagagtgtggcatcgacgaggaacaaggagggaggctgggttaagagagaggggcgactgaggggacgtttacctcagagctactgccatgtttcagcatgcgaaaggaggaaggggctacctcctgcaaatccaaaagcatatcaaacatgttatgcgtttgggcggatgagtttgacaaaacactaggccctctgaaatttttggaaagatctttcgcagctggcccatccgatttcctaggggaattatgtaaaagaggtagttgagtattctgttgttctgccgccttttgtatttcttttcccccaatagttttcttgagagtccacctagactacgacctatgtctcccatttatatcttcttgccctttattgcctctttcttcgcttggttctcaccaaccctattttcacgagctcctagctagggtttcatctttctccttctcttccgatttcttattttttcatgttatggcccacccgacgataactattgcacaccgactgattctctgggtagacgaggtcttgacacgtatgccttaaccatgcccttgccggtgtattggagttcactttcataagaacgcagaagactgcaaacctccttcggtcaccatggagggaatgggcatcgatttttataatgctcccaagagtatttccaatagttttcaatatctccttcctaaaaaactccaggggcttccggagattcacccaaaccgggtattgagtgatgctttcttgggaaggcttgaaacccggttgccgagcttatacccaaatttgagagcccataacaaaccatggtcccacagtcaaaatgtgagatctctcttccggtgatgggaattttgtacagtaaaaccaacgacccagcgatatctctatggcccctttccatgatatcatagtttccggagttcctatttcagataatcttgggagaatgaacaccccaccactttgcttataatagcatcaacccacggtttaacaagctcaacatattggctctcatatattggtatgaaaacttcctcctcaccacaaggatgagggtgagagtagagatgtaaatggatcgggttcggggcgggtggagcatcacccgctaccatccgcaccacccgatccatccatcacccggaaaaatcaccacccgaatccatccatccatttacttccgggtgaacggatggattgggttataatcgggtgaaattacctcaaaataatgctaaccataaaatttctaaaaaataaagtttcaaccgataaaaccatagatccacaaccacaattcaaattaagttcaaaatcacagtaatttgcatataaaaattaggaaaattaggttgggcattgggcttttagatttggacatttagttgggccttgaggattggacctaaaaaatatttttttaaataaacgggtgatgggtcggattaacgggtcgggtgatggatgaaaattgtccacccgaatccgatccatcacccgcatccgttaatccgtcacccgtccaccatccgtttaaaccgggtttttcacccgtccattaggacggatggaccgggtgaccgggtggtccactggatattgccatctctaggtgagaggatgcaaaaggaagcgggggtgaagggaatattcaccgtgatgttatggttttatatagagttttcttccctaattatgtgctaaaagttgtgattatggtgctcttaggagccatttggtactaactctctccatctagttgtggtttgctattttgtattgaattgtaggttttggaagctatcacctactttacatgattgcacaagggattagaggggttagatgccgaagtttctagatcccgaggatgatttccgggactttgagcaaagaaagaacaagaaacgaagattagctagaccggcccgataggatcgggcggcccggcccgatcgggcgagataccggttctcatgcttctgctgcgggcccgatcgggcgttttatgccctgtcgttattcggtctttcgcccgatcgggcgagttggcccgacgtcgggcgccattccagcaatctgcctcccattttataagaccgcccgatgacattgggcgggtcagcccgattgcattgggcgtctggcgcttttggccttaatcatctgctttgaagcccgataggatcgggcgacctaggcccgatcgggcatctgacgagacgcggacttttaatgatttcgggcccttctttcgagattttcttctattcttttagggcttgtataaatagaaaaatcagaattatgaactcctatctagtttttattattagttttctccatagagtgtttcaagaaccttaatttattgctttgtgatttcaattcaagatcaaactttttgcttattcatagttcaatataattcggtaatctttcttctttacttctttattatttcttccattgttaactatattgttttcttagttatttgccatgtttccaagtatgagtttttatatgattcttgttattgatttcatgattatgagtgagtagttctatatctagaattgtggagatctatgtatgcaataagggattgatagattagtttgattatctggtatttcaattgtttcctttgattgattcttcatgctaggattataagttaggcctgatttatatttctacccttgcaatactgaatctacttcgagaggagagataccgtataggctttcaattattaggcaaagtgacccttgactatgcgagagcggctgggtgatctttgagggaggtaatgttcgagagaaattacatgtgccctagacaattgacttactaggtggttatcgtttatccttgatttcccaaattgtatgcatagtgatccatgattctagtactttagtgatatatttacaccttcatatttaattacatttactgtttagcttagtatcacaaccattcatccgattttgttagtataatattagagttcagatacaatagtataacttctccctgtggattcgatcctgacttccctgactattagttagtggaccttaggttatttttgattaggtgatacgactttagcctgtcacactgctatcttaagttggcactccgccttactcctaattgcctctttgaatgacctacttttagacgaggttgcagaatggggggagggggaataggtggacctaggagaggagggagggagggactgggacgggacttacatcggcatttgctcgaacacaagggttatgcagtaggaggctccgacatcgtctctcctcgtgttatgccgtgcggccgggttttggtgggtttttggtgacttaagggagagagaattctctctctctaagattctctctgtaattaaagccccttgatttcgtctttttgaaatgattgttcttttaccaaattaaactttagttgatcgaaaattccataataccatttagttcatggagcttgggataagaacacaaaatgtatgggcatgggctagtacctaaactatcatatgaaagatttgcatagcactattaggagcaaaggtggagcaagctttgggaaggcaggttttactatccaggctatagaactataaaattacttcacttatattacacttattacagactctactaacctggtgactttttatagggaacaaattcagttggtattaatcttatttggacattctcagattctaaatctcgctaaggagtctccaaaacataaaaattaggttatagaacgatatatggtccttttgatgtggtactttctcaatcaactatatgactttaatgaagaaagacaatgttatagtgtttggttgtcaaagttgctaggagggatgtgaatcgagctcctactattgtcaagtagtgtgtggaatctatgtccaatattattttgtaatttttggtttattgttttgttctttgatcttatctttatataaaaaaaatcaataataattactccatttaatttgttcaaacattttaagcaacttcagaaaattgttgattttatttttacagaattctaaaaacgttataaatgaattttgtttgattgttcactcgtactttgcaattctacttcgcaacaagttccaccaaaatagaaactgttcacctttgttctaaaaaaaatataattttgcaaagtatatataataagttataattactgtactatacttaataatatttccttccttactcaaattaaagaccttcttatttccacttgttatgcatggttgtcaatgtattatttgtatgattaatatctctaattacatattagtaaaaactatacaaatatgatattttgaatgtattcaattagatgattcaaacaataccctatgtggagttgtcattgcattgctagattatggggagaaagttgtcatggctcctcaagctgtttcacctatgtggagttctcgacgtcttaaggtaagccatctattaaataatcaaacatttgttaagcatgtctataatttttttgtatacattgcaaatcaagtgtacctagaactattttctcttttatatggagaatcttttgtttgctgcatgctccattagtacacctcaaaatttgaacatttcttcaatgcaacaccccaaaataccattttcaattcttgtatatgaaagataagaaaacattgataagttacaaagacaaacatggaaaagattgttgaaaacttggtttcgtaacatgacaatttctagagaactaccatttgcgacccccctcccatagaataagacaagtttgtcattttctcgaaatttgtataaatcgtctaaaaaattgaaaattgttatgaagtcaaaaagtaaatgtcatgtatttaatacgtagtaagtttttcataaacctacatactagggtaatgtacacatgtttacttgtaatacatgtcttgtagtataaatatgacgtttgccataagtagtaatacatagctttgggaagaaagaatcactttgttattttcactctataatctttctgttccctttatttcacaacaaaaatgtcataaaatggacttctatttcatgttatggcagatcatcgcgttgaaatggatgcctattggaattgcaatcaatgttgtcgtcattcttctgttgtgggcttccttggtcatggcaaattacgttgctttgtgctcgtgacataatgtcgtagaaggcccaatacacttttgtcatttttttgaaactttgattgctacaaaaaactctctagtctgctctacatttattcccagttacacaagtggtttcaaggaaactatagcaaattatatggataaatgtaaacagttgtccacatagtgaaaatgtaagacttttgggacttacaacatctctacaaaatagctagaaacttacacagaattcttaagactgcaaaaataaaatgagtgtaatacttgatcatagtcatactattggagaccgtaaactactaggttatatggattcttgtgtgacacattcaatggagatcaaaccgccacttaaatgtgaaacaagatttctctgtactattgttgtgcatcatcaccatagacgctaaattctctttcatatctttatttccgctcgtagcatcaaaatcttctatgttatgccaccaaaatttattgcaaaactgctcacaacatccatctcggcctttgctagctaattttttacacaagtactgcaaaatcaaaggaattctttgtagttttgcaagtatacccaattaataagtagacttttatgctaaaaaaacaataaaataacaagatccgtctcaaaatcacccctaataagttccaatcaggtccaataagttaaattaggtccaataaaatatgtttagttcagttcaagtctaataagttcagttcagggttgtttaggtgaagagaatgcaccctaagtctccaatgaaccctcaattactatggagatgaggcactaatagtagccagctcagctcacagctcaaccacctaagctcagctcacagctcagctcaataagttatttcagttcagttagttagttctcctaactaccttctgattacattctttcatataaatagttctctctccttagattgtaattcaattatgttagttcacaatattctctcatttgtaataatagagagtttcttatctcttcaagattcttctttcttatcagtaaaacttcttctatattgttattgattataattgatcacatttgatcaactaacaattaccctttattgctctcaatacccctttgatccgtctgaagatgctgaaatcctaacccaccttcctgtcctaactccagtcctgattcccactctgtagtagcccatctctctcctctgcttgagaaccccgcctcagcagtcagcagtcagcagtcagcagtcagcagccagcttagcttccggactgtaatacagtgggggtggagggtggcggtaattctgagactcgaaatatgttgacagtttacagttggggtatgacagtgtttggccccaataactaattaaaatcttagaaaatcttatgtataaaacctcaaacatcagctaatctatatataaggataagatcagtacctcaataataccagtacaatagccaagtatagtcaaggtagttggataggtgctccaaactagcccatccacaaaagctgctgaagtttgttttgtgagatgattttgcctcgccactttaaggtgaacattgttctgttgggaaggccgaattcttgctccaaattcattgagttcgaattccaccttcaaaattaatcaaaaacagagacaagtagaatatttaacagcacatctgaatcaaaagttgagacatcaaagattgcactcctgtacctgtatcctggactgtatccatgggtcaaatcttgagtcaaatccaatgctcaaatagattttttgtcctgctatatgttccataaataccttaaagcggatgaaccacgatgtatctaaatcacaagaaagacaaaaatgcaacttaacaaggcatttatgagttggtaagttaagtttaagtaatgatggtacttggtccccctcatagagcaactcccttagatttgggcaatcgataaaaaccttcttacagccagaaccacggtatttgaaatacctcaaattcggacaatcaacataaatcttgcgaggatcaaattctatttctaacttccttagatgataattagctgctttaaaccaatctacacgaatatcttctatcacaagctttgctttctcaagaagtggaaaatcagctgtaaggtctccatatacgagaggatggtctactaagcggagatccctgatattactaccaccatctgagttgaacaataattccaaatgagtagtacaagaaaaactctcaaggtttacacattctctgatgtcaacttcaccaatttcgccatactgaaaaccctcaacataggctttctttagcttatgaaatatagaaagcgtgagagttcccattccaaaagtgcaacattcaaactctaaaagttcaatcaatgggcaactaattgccaagttgcttatggtttcctcattcgacaccaaaacatgtgagagccacaattgtttcaaagaagaatacatcccgaccacatagtttccaacagtggatgataatcgacaacctcgtacagtaagagactgcaaccattttgaagaaacaagtatttccaggtaaggaaaatcataacatgcgttctcacgtatttcactataccaagaaaagtcttttgtttgaacaaaaatgcacaactcctcaaccttagtttgtctaactagattcatcaatcgatcaacatgagaaaagtcagcattattaacaaccagattcgatgttaattctaaaactggcgtatgttgttgatttatagtcaacaagcgattattcacaaaattcatgaatttgtcctttatttcctggtcttgtccagcactttgagcagaaagtggtaattccgaagcaaataaagtctcatcaaaatgcaaagattgcacaattttgtatgaagaacatacagatttccaggtcttggaaagaacggatgtttgagtagcatcttttatgagaagaaatgatagtatatggtggattatttcctccggcaatttcgaaattcggtccttgtgattgatgtaatacatctttttcttcatcagattcttgttcttactatcttattcttcgacaaaacagatgttcgagtaacagtatactgcacatataaattacaccactaaagttacccagaaactgatcattactacacaaaaatacacaaaatgaaaaaatcagttgagcaagaacatatgtaaatcagaggtatacaacaaacagtagaagattaaaaaaatatgaatggtaagagaattgaaagaaattcacctaattgacttcgttgaattcttgtaatcttgttaccaggatttgggaagagtgtgattttcaagaatggccgttgtatacagaaacaggtcctctctacaggagaaatgaaaaggattttggtaaaagtatttgtatttgaagataggaattggaaatggaaagggaatcgtaatttattgaatagcggcttgactgttaagtcttaaccatccggctgttcaagaaattggatcaagttcatctgatccgcaaaatctgatatctgatccgacatatattcgaaaagtatgatacttggcaaatttataaacaaaatttagaagtatatatggtaaatttgtaatgtatttcatgttgccttagagagtaacaaaagggtgctttctcttcatctgaataactctgaactagtctaaattgaatttattggacctgaactgaaattattagacctgattgacccttattagaagcgaaaattattggacatgattgacccttattagaacttattgcacccgattgaaatttattgacctaattgaaatttatcaaaccttattggacctgtttaaaatttattagaccttattgagcctgattgaaacttattataccttattgaaactaattggaacttatttgaccttattgacgaaaaaattgatgagttataacataaatattacccctaacgtaaatagtatccctcaaaatttattatgaaataatcatcattaaaatttaccctttaaaaaattattattattaattatctcttatgataaacaatttaacaaaaaaaatatatactatttatatacttgcctatgcacaactttcaccactaatatatctaatagcctcgttaatagtaatatgaataataaaataatagacaataatataagtataataatatacattgtggtactttaattaaaaaatttaataataaaataatcagctaatcgttatatgaataataaaataatagactataatacaaatatttaataaaataatagacaataatacagatataatacgatataattattgtggtactttaattaaaattctaataataacataatcagttaatagttatataaataataaaataatggacaataatacaaatgtttattgatcattgactatttggaccttattggaacttattggacctgatcagacctgattgaaacttattgtacctgattgaaacttattggaccttattagatctggaacttattgccctgattgaaacttatctgaactgatttgaacttatccgaactgaacttattggacctgaaacgtaatttattaaggtgaagagaacgcacccttaattgtattaacgtttgtggattccattcaacttttttattttgaggcactatataataaggtggtcatgtactcataagtcgtaaggtcatatgaaactcgtgaactgtcatgagtctgatgattctatttgtcaagcactttttttgcgttcattgtacttgacaaactcaaacagaatacgaactcattttagtacctacacttaatagcaccaaattaaagacaacaaatgaacaaaagaaacttcattggagtttttcagatctgtgttatttgattggaattaatccgatccaaaattttgggtcggatcagatatccgatttgaaccgccttagactcactaaatgacctatcacaaccaagttgatctcacacaaactccacactaggagttgttctaatcacataccccatactagtaacagtaaattaagtacattaattttgaactccaatagacaatacccaacaaatcttgctcatgattaaagattaaaaagatactagtctattcaaactcaaataattcatgcaattgccttcatgtttttttagtaaggagaaaacaacctaacactacccctataataggaacagcctagagcatcctttctggtgatggaagaaaacataatgttggaagaagaaaaccaatacaaaaagcgaatgagccttgtgaccatgacgcgccatgtgaaaagcttcaaaaaccctttagctaaaattagagatatttcataacaattacttgcatgatgagaacatccattaaaatttagatttgttgctaattattcagtctctctgaatttcctattgacaaatttataaactttcggttactaaataagtaaatgaacttacataaatgaacttcatgaaatcgttaaggctacgtttggtacggcgtaaaatattttcttggaaaattattttcctctattttcaattttacattatttggtttgcaaaggagtgtaaaatcatttttcctagaagtaaaattgctcttcaaatgattgaaaataatagggaaaattgtttcctttcacttttattatctttcctttacacacctctccctacctcctttctttctttttcatttttctttcttttcgttagttttcttccatgaagtcaaacaacagaaaaataattttggaattgtgttttccattctaaaatctttttcatgaaaagtattttacaatgaaaatgttttacacccaacccctatatctagtatttcaggaattggatgatgcttccttttatttgtccacgtaaatttgggctcattaaaccctaggtctattagattacaattattcatggtatttgcaaaaaggtttgccctacttctagacacaagtttcccccaaaaatttatcgctttgattgacgacttcatcaaagtcacccacaataagccaaggtttattccaattatgtgtaaatctttcaatagaagcttcctatttttaaaacttagtacttgcataaattcaaagacaaaagaagatttagtagatattacctcaaccacgtcgtagactccctatgcaccttctctaatgacttgaaaatccaagatgtgtgattttcaaagaagaatattgtctgcaaaacccgccggttcgagcaaatgccaagagtcatagcccagatccctaatgatcccagccgtcttttcccgacccacaagtttcggctaagacaaccaatgacgggtagtgatgttgcatgagaagcttaaaattaggcttaaaggagggcctggcaaggcctctaacattccaaaacaacaccgtcattcccttgtgtagtggtgctttttccaggaacatcctgagtatcccctcatttcctagtacccatgggtctacttcgactccgaattgtgggaatgtccacatctttttgtgcgtccaaagggctacctggcttcacgcgggttttttctgccgcttgcctctccccaagtcatcgttagtcccaattgtttcaagggtctgtacaggcgtgctaagagcacaacattggtgttgcttgaagctatctttctgctgaaccaagatcatggtgcggaccatcggcaagattggtattggatccacccacgagcctaggttggctaataactctctttcttcgctctctacccctccctctttttttaggaacaatttcaagaaaattttcatgagaggggaaagatgagtggcatctcgtatttatagcacatgagctgggagaaactcggagcatgaatacatcatcacgtgacccttttttctggtgtaggaacgatttgtctattagcgctttcacctattgccatgcaagttcaatgtggaactcgttcgacttgtcgagacaatccgggagataaaactccattgcttccataaacaactttgattttacgggtctcgcttaccaggagaagaggatcaggtcgaggggtttttaccgtggatatctttgattctgatggggagtttgtaggtggggataatagggaaagggggggaaagatccggacagtttgagatactctgggtctcttagcatcatcacggtggagctgagttgtttgagctggggtgaattcttaagcaggtgataacacgtttatatactcattcttatgtgatatatttatgtgttttcatcatatttttcccatataattaatctcttagagctattattctttacttttcgctattgctctcctcgggtgtatttgttttgttttttttgtaggattatgtcgtttttggagttgattgggatttgcacgaaagcttggatgattgcggagcattcaaatggattgatagctttatccggcgatgattttgaagatatattgcgatatggtgttggtaaccattaattaccatgcctaaggagctacaaaatggacttttgatagcaagagaacaaaaaaacagcataaaccgccaccctttggcggtcctttcaagcttaccgcaaggccatggcggtctccaatttcaatattacgtaatcttagttttagagtgttttaggagtccaaatcctagtcaaactccttgtatttggatagatataaataggttttggatagaatttgaaaaggagattcttttagagagaaatcacgtgagattggtttttttacttcttcctcttggctgcttcacgttttcatcacgttttctccatactttcctcaagttcttgctttcgacattcaagtttgcaatttcatcaattaattcaagtattattttctcttctctattctatttattattattgttaatcatgctttcttttaatatttattttgtttattcaatcatcatgtgtgagtagttttctattctagggttaggttgaaccctaatatgaattgatgcttgtttaattcccaactcccaaactttgattaatttatgattcatttactttagggttgggtttaattatcaatatatgactagaaatagtatatattgaatgtgattatttttgcaacgaaagttggatcttaatcgaaactagaaccctaatttaagataaaggaagtcatcacgaaagtagttgatggaatttattaggatgttaggatgctatgtctaaaatccttaatttgcatgactccatgaaaataggcataattgcattgttagggaagctattgattgatcgaaagaaatccttagtattattagggcgcgtctatcctatgagttatttattagttaattaagggaaaaagggattgtttgtggcattaatttgtattagtggggatacttaaacctagatgtctttagtctttgattcactcttgataatttcatttgctttagttatttagattagttcatcatcacttatttggattacttgcttagtattaattagagtcaatttaactactttgaatcggttagtctcttgggattcgatccttacttgcccgactacattagttaggaggaatagttaggttatttttgttaggtacgcgataagcctttcaaattttggcgccgttgtttggggactaactaagtatttaaattagttatttttgattttatttttgctaagttttttcttttagtttgttgcttcacctatcatttcttgtttatttgatcttttgtttttagttctttctttgttgcatgcaaactcgacgtagaggtccacagaatttgattcctctcgatcttgaaatcgaagccaccgcacgcaagcaaggaagtacaaagagactaattaagaataagaagaaagcaatgggtgaagaagcaactaaaactctttgggagtacggtgtaccggatactacaaccgggtgcattatcgagcattgttcgaccagccgtcaatgctgcaaattttgaacttaagcctcggttcatccggttcatctccaacgattcatttgcggggttacccaatgaatgcccctgtgagtcacattgctagtttcttggagaaatgcgacacggtgaaaatcaacaagtgtgagtgaggatgctattcgactacgcctttttcctttctctcttcgagatagggcaagggagtggttgagagatgaaggtgtcggaacgtttgatacatgggggaaacttgccaaagcattcttggtgaagtttttggggcaagaaaagactgcaagggcgaggaatgagttagtaacctttgagcaacatgacgacgaatcattatatgaagcatggagaaggtttctacgtttacaaagacaatgtcctcaccacgggattcccgaatggatgttgatacgagactttctacaatggtttgacacatgagtttcgtatctacattgatgctttgcttcggtggttcccttatgactaagaacccgaccaagcaaaggagttgattgagaagatggcgaccaatgacaactaccatccaaatggtcgcaatcggctaagaagggaggtaaatatgatgttgatgcgctaaccactttaactaataccgtgcgtgcactatctcacaagtttgatcaactccaagctggttcatctatgatggtctcatgtcgatgtgcgagtacaaggacatgctttactgaaatgtcaaatcaacaatgataggatgacaattgagcaagccaatgctctttataactccaatccaaagcagccatatgatccttattctaacacgtacaatgaaggatggaggcataatcccgcattctcatacaagaacactcaagcacaactcaatccacctcctccacctcgcaacaactttaatgcaccaccaggttttcaagctagagcaccattcaatcatcatgtcaatcaaagtgttaatcaagaacctcctccaattcaacaaagaacaacttggagattatgatggagaaccttttagcccaacaaactaacttcatggctcaacaaggtaagcaaaatgagaagaccgataacgcaattcaacaaattcaagctcgaacaagctcttggaaagtcaaataagccaacttgcacatcgggtgggccaactatcaaaagctccaggtcattttcctaaatagtgaacaaccacctaaggctcatatcaatgctgtgattttgaggaacggaaaagagctacaagatcatcctttgaaggagccatcaaaaagaattgtggaagagacggttcaaactaagaaagtggtagagaatgagattgtcgaagaagagaagaaggaacctactcctacccctattcgtccttacacgccaccggtccattcccacaaaggttggccgtgcaaaattagagaagaaatatgggaagttccttgatatacttgaagaagctgcacataaacataccattcttggaggctatctctcgagatgccatcttatgcaaaatttcgaaagacatgctctcaaacaagcggaagatcgaggaaaatgcaagctgtttcacttacaatgagaatgtagtgctattttgcgaataagcttcccaagaagctaggggatccgggtagctactctatccccgtgaagcttggcgatattgaaataaaaaaggcgctttgtgatcttggagcaagtgttagtctaatgcccttctcaatttgcaagaaacttcaattgggtgaaccaaaacccacacgcatctcctttacagttagcgatagaaccgtaaagtatccccttggtatccttgaagatgttcctctccgtgttgggaagtttttcattccatgtgactttgtagtaatggagatggaggaggatgcgcaggtccctatcattcttaggagacctttcctggccactgctggagccatcattgacatgaagaatggaacgattacctttgaagtgggtgatgagaagatggagtacaatctcacgaactccatggaagctccctctatgggagagactatctatagagtggatactctagatgcgacgatagaggtaaaagctgctagtctacaacttgatgattcaccacaaactgtcttcatgggaagtgctgatgaaaaggattgggaaactaaggagtacaagaggctcttagaggaaccacattcattacctagtgttgagcctgtcacggaggtgttgacactcgaagaatctaaggagaggactctgcttcctgaggtagagttaaaagcttatgaaaactcaaggttgtacaaagaacgaaggaagaggtggcctgacaagcatatcatgcggcgaggatttcatgaaggagacttagttttactattcaactctcgattgaagctatttcctggtaagcttcgctcaaggaggttcggtccattcaaaatccttaagatctttccgtatgactcggttgagatttggagtgaagcaactggctcctttaagataaatggacaacgtcttaagcactatcgagaaggtgaacctattgaagggaagacagtttacacactttccgaccctcattcagagtgatgtgaaaaggtggtcaagctagatgaccttaaactagcgcttcttgggaggcaatccaagtcttctctttcattttttttttctattacttattcgatttttattttcattttttttagaggtttcttagtttcttttcttagttagtttaatattgtagttgtattatatgattagttagtttaagtattaggtatagaatttagaaacttagcatctttttttttttagagtttaattctcctaatttttaatttttggtgtttttgtacaggtgaaaaaaaaaaaaagagagctgagaacgtcccacagatcagtgtgtattgcgtaggggccgcaattcgtcatcccctactgccaccctcctgcaatccctcctgtattccacgaagcccatcgaaaaaaaaaaaaccaaactgcacacccatcgcagttcagttctacatactgccatcccaccgcaaaccctcctgaattccaccaagtccatcgaaaaaaaaaaaacatcctctaccccctgcaattcgactctaccctaccgcagcgacacaaaacaacaacaccgcaacaaaattcgaagagagagacacaactgaaacaagaaacgacggtggaattcgcactccattgaaatcggtttgaaattcacctgttcttgttcgaaatatgactactgggttcgaattttaatggctgaaattgtggcaattcttgattccattcactgctcttcgctcctctcttgcattagcttcttgaaattagatgattttgctgcgaaatttcatcaaaaattgactcgaccttgacgattttaatgacaaatttgctgcgaatttcatcaaaattgactcgacccttgacgattttaatgactaacttgctgcgaatttaatggtttggggtttcttatgcttgaattgattgacgtcaatcctcgtcctgcttgcaccgtagttcgactctcaattcgcactgtttggcagaaattcgacaccaaataatttgggttttattttattgctcgcctatttggcgcgaaagaaaaattggcgtgatttccgactatttcgagatgtatttgtgacaccaaattgttcgagtgtcttgattttgatggacgatattgtgtgtggggtcgtacttctaagcgtcaacgagcagaaggacatgattaagcacttggatgcaatctcgagggttctccaatcctccatctctcccttctcaatgtgatcttgtgagtacatctccccttttcttttgtgccttactattgcactgtggacattgcaccatttaagtgtgggggaaggattcattgtatatagtcgtttgttcatttttctctctttttggtagttttttttcttttttttcttttttaggttagtttgatatttccaagttgaatggcaattcaagtgagaactttgaaacacattgctttgaatgttttgttatgaatcgacttgcactgaattgatgaactattgcatgaaagatagcataaatccctccgtgatttggtttgtggctagaatggtctcctttgatattgactcgaccgacaataatagcttgagtaccttggtgaggaatttaagccatattcgatcgttgcacattgttttagtcgtgttcttttcatgtgtgttagttatccttcatgtaacttgaatcttggatttgctctgtgactatttgagactttgcgatgcaatatggaagaatgattgatgttctatctagatgattagagcttcaacatcttagggccacaataaattttttcctttttacattaacccctaggatgaactaatttgagcctcataattgcctttttgatagccttacatcatatgccttagagttttttttttaggttttgtcttgaaggtggatcaattggtatgccctatgagtaattcgaaacttgaaaaaaaaaaaaaaaaaagacatcgattcttgaaaacaaaaggaatttgaagagaaaaaaagaaaggagatgaatttgagaaaaagaaacaaaatggggaagaatgaagaaaatatatctactatatatatataatccccaagtatgtgcactatctcctcaatgtaagtttcaatgttcatacaagttccttggttgttgtttgaaagaaattatttgtgagagaagaaaagggcaagcttatatggagtttggtggatataaggatggattgaacccgacatttggaatatgtagtgggattaagttttcttttatttttgagcaccacattcccaaataacgttattcaaccccctttaaccaagcctaccctttttatagaactcatgacttccgtgttgcatcctaacaagataagtggagaaagtcaatttgcaaatctaaagaagacagttacatgaagttgatgtgctttattgcatttaggatgagtgattcttattctaaccttttaaacacatgagtggcttatctattttgttttacacaactagagtgagaagctgtttgtaatatcctaaaaacttaaccatgtttaagtaattaattaaatatagttatcactaatttgactaagatttagattttcttttattatgttaaacataaattactagattttgtaaaaaggggtaatcctattcttttgtttaaccagaaaatattagacttatatttaaccatcacccaactaggtggttgaaagttaaccatgaccattttctgatttcataattaaaagaaaaataaagaaaatattataaaattgagaaagttgactgccttcttcctcctccttcaattccttcattttcatggcaaacacatggcacacatgcaatcaccccctcttcttctccttcatcagacaaatctgtcaccaatcctcacccaaagcttcttcaagttgacaaattcagattatttacttcaccatcttcctcccaaccaccgattttaaaacctccaaactccactataaatagccatggaaattcaacatcaagaactcaccaacaacaaccttcatcatctcttctccctctaatctgaaattcagtcaataatcgccggaaaattgtaactaaaagaaaagaaaagagaaaacccaaatccataatctctctcctctgtttcggttccccccccacgaaacacccccgtcggccaccgcgcgcgccacctgcgccgcggctcagtggcgtctctacctctctgccgttcgtcggccgcctcgcaacccgccggagattcgcgcaagccagcacgcacgttcgttctctctctcctcctcgcgcagctcgttctcgtcgctctccttcgtcgcgctagcagcacgcgcacagcatcgcgccgccaccttgccgtcgcactgccgtcgttcgccggaagcgctgttcgccggagttcgcagctccctcgcctcacttgtggtcctccctgctcctagtagcagaggtgatggtttcccccttttaattttctgatttcttattctctaatgcaagcccaagatataacctttaatctttactatttttatttgggcctagagtcttgaactcaaaagtaagcttaatttttaatctgaattttactatgggctataaacttgttgcatgtacaatagttaggctcaaatctgacctctttatagtattagctaagctacttattattaaatgggctaattgagttaaactaaagctgatttagtattttattaagttatgttagtttaattattaagttaagtataatgttggacttataatctgatttacttagttaaatcatttaagttaatcttgttgctttaatatattgagctttagtggactgatttagttagttctactaaaccacctaacttatttactaaaatctattattgggttataattcatgatttctaaactagttgagttgtttaaaactaattaaaaataattcattaagcttataattgagtttaagttatgagaacttcatcaatccttaagttcacttatagtaattagttacttgacttgttagctttaaataatattaaaataatgttaatggatctagtataactttaaatttaattaatttattaatggacgactaattagttattaactatgaactagaataatgctatgttttcgaaaggttatataatatgtagtagtataactttaatgtttcgataattctaaaaatataaccaaatgagttatttcattgattagttgctaaagagtcaccttaattgaacaaagttattaacgattaagaaataatgacctttaaggagacctttacgacgctataatgaccgctatgaccttaataagcgctagctaatatttaggcttaaaagctaaataacgaaacgttcattaataaaattattcttgaatagattaaagaagataagggatattacaagcctccccttatcatggttggtggcgaggaattgtgtaacgtctcatcgctaacacccgcattccccttcaaagtatgttttatgatcatgattaatattatgttttatatatggattgcgggaaatgaaatgttttatgatggttattatgatatgatgctatgagatgatgatgatgacgaaagaatataattattcacgatgatgatgttacttaaaaccaatgaaacatgataaattcaagtgaaagacggttcttggcaagatgatacgggcaccgcaagtgtcacctatgttgtgaccgccgatgatcaagttttctacgggcaccgcaagtgtcacctatgttgtgaccgccgatgactgcttttctacggcaccgcaagtgtcacctatgttgtgaccgccgatggttttatgatacgggcaccgcaagtgtcacctatgttgtgaccgcccgatggtttaaatgatacgggcaccgcaagtgtcacctatgatgtgaccgccgatggttatgtagtgggagacgccccctatgttatgatgtactagccaagttaccaaagtaaaagatatatgatgatgaacatgataaagaagataatgtaacatgatatgatatggttgtgaaatgttttacttattctctcctccctgtttataactaaaatgatgtgaaatgaatttacgttgttagagtagtatgttaccgagcctcggctcatgacgttttgttttatgttttaggtatggaagaacagttgtggatcactaatagactgcgttatggagactaagtatgattttatgaggttttaggatattttgtaagatggataaacaagtattaattttgcgatgagtaattgtatagcgaattttaaattttaggctactattttatttgtgggccataacccacaggattaagttatgcttccgctgacgattaaggtcatgtaaaatttgtcggggcgttacagtggtatcgagccgaaacctagcctaagtgcggagtaatagactttgcaccgcctaggagtggtcctttgggaaattagatattgaggaaaactcgaggttagtaaatgaccatttgggttgatataagatgagttataagacaatggatgaaaaatatgaggtttacttccatgaatgagttattaggagttgaggattatttgggttattggaatcttaaagaagtgaggatttgaacttaattatgatcctttgaggtattattggaagattagaataacctaaacgtttggggttactagagtgtaagatgttaaatgaaaaaaaaaaaaaaaaataaaataaaaaaatttgcgattcaaacttggcatgaattatctgcaaagattgatgttgaataacttgaggataaaccgatggttatatgggtcatagggactaaggtgaacgatcttttgaggtatgagtagtaatatttgatgctcgaggtaatacacgaaataatatttagatatgtcatgatgagtagggttatttgtgggatgataaaaaaggctaagcgatatgaaatcctgatggttataaattgagattgaatttttactttataggagctcatatgacgattttggagattcgaaaattttgaagggatttagaaattctacttgaggaattagaaaacaattaccattactttagttattaaggattttagttttaatggttggagcacttcataatgtgatgtgaaccactttttgggatgttatgggattgtagtgaaaaataaattatgactaagtgattgaagagttagacgaatcaatgtcttgagggaataggaatttgctacttggagatgtaatagccatacggaatataattaagaaataagcattgatgtcgagacgaaacttaatgtgcataagcgcttgattttttttctattttaccaagatttgggacaaagaatttctaagtttgaaatgttgttagataaatggctccttcgtgtatgttattgagatgatctaggaatgaattcaagtgatcgagttaccaataaaagaggataatggaaaatgtggaggaaattgaaaatgagaaataaatattatttggatcggtgaagccttgaataattaagatcttgagtattgatgttagctaggtaaggaagttggtaaggagtacgttatgacattatcagattagtaagtgcttaatgttgaggctatgataatgatattgatttggtatgataatgtgatgattgaaaatttgggaatgcacaaatattgggtttagggatctttagtgaatgccttattagatgatactgttattatagagagaggaaccaaaatgtgaggcttatgaatgcctcgtgaagcttatattgtggaattgataggagagcgcatattatataccaagcaggatgagaatcgtcaaaagataatgagtaagaaaagaatgggttgttatattaaggggcatgattaacattcgagtttaagatttctaagtaaaattggcgggcttagtatgaaattgtgtcatggatatttaaattcacaaggattcaacacatattatggaaagtaaagttgtcttgagaaagtttgaggttagattcaggaacactatgatctccatatcgtagcgtaaaggttttaaataagttaaatgggttggctaaaaattaagtaaaccaagccatttgagcgtttgcgcttttgcgtgtgcaatatgaatctacttatgtaaagatgtggtgcatgtgattatctgtgttagttacctcttaatgcgtacgtagtatcatgcatttttttttttatgatatgttgttactctaagtatgtatcttgataatttgagaaaccaaaagaatttcaaacaaggtctcatcaaatgagttagttggaattcattgccaacaagtttgccctttttgttttctttgctcctcgatttcgcgagtcgagttgaagtagagatacaaaagatgatggcggaatggaggtcgatatatctaacgaagccatgaaggcttgagatcttggtcttgttaaatgaatttagcttgttgttttatcagttaactaaattgcaagtttcgaggacgaaactttttctaagggggtgaggatgtaataccccgaaccttaaacccgttttattaattactaattatgtttattagcataattacgtcctaaaatttttcgaaattattatggagaaagttattttataaaacaagtatattcatactactttaatgatatttattatgataaatgattttatttacaatatagtttatgacttcaatattatagatacaagtcaaagtaaatagcaaagtttaactttttgacattcaaagaaaatgagaaagaaaaaggaatgaagggaattgttgttcagctttccccaaacccacggtcaacacccaccacctacctccttgtcccctacattaatcttccttaattgaaccaccattcatcatctttccacctcctttcttctttcttgtccgataaaactcaactataagaatgcatgcactaagccttggaaatcacaagttcaacaacacaaaaaccagaaaatttcttcttctctcactcctctttcttcacggcaccaacccaccaacaccggtgcaccaccgcttggtgcgccgcacaaccaccaccggcaagaagaccgagcaccgcctggagatgcgttgcactatcgcagcctccaccgcgacgcaccccccgtgttttctctcaccttggttcgccgtttcgtttctccaccgccgccggagccatgcgaccgacggccgacgcgaagaagttgccgccgccgccgccgacttcccgttttgtcgctcgccggagctcctgtccgggttgttcgtccctgctccaagagagcagaggtactagacccctttctttctttcaatttccctctaaaattttgatttcaagtttgtaatgctaacccacttgttacccaattgctaattagtgtagttaggcccaaatggttaaaccaacccaattcaattgttgcatgtgtattatttggacttaaatcgatttttgtaatgttaattgtgttacttagttaattgttgggctattagagtttaactaagacttatttgcctaattaaactatccactttattttattctttgacttgtggggctaatgaaaaactaaattgattaaattagttttaatgaagatacttggtctaattcttttaattggattgttttattcttatgattaagttatattatactaaatattttttagtataagaaatggttttaaatggtttatgttaaataattttcattaagcaatgttgatggcatttctaaaacaaaatgttttaagtattacaaatcaagagatttaaatgaatcgacctattaatctcttacttaatttcgtctgaataattaaatcataggttattaggaccttatggagttataaaattgaagttgggttaagtaggaataatttggttgtttagtggatgatttcgattatgggtcatgttgttataattttgagggggatacatgtatgacgattcttggaagctagttatgacgatacataaggagtaagaaagggaataacgttcgaggtaacctttcatgtccaaagaatatgtgtatgcccgtatatgttatatgtgatgttttatatatgctcttgcacatgaatacaagtatgtgatgatgattatgtgatatgattatgtgatccgattatgttttacaatgtcgatgtggcatgatgaaatatgatatgattcaatgatggatatgtatactatgaccaatgatgttacgatttatgaaacctagttatcatcattttgggtgttattcggaaatatgaacatatgcaagtttgtaaaagtggatggttctgctggcttggcattatgaactgaactggcaaatgggcaagtcacaggtggaggaattatgttacgatatacgaatgaacacggaccaaaagggtcatatgataaagttaatgctatgtccaaagcccagtacttgccaatgaactatggtcacgcaaatgttccttgtcgccagactattcaacgatgatgttttctcgatagtatttccgaacaattaccaatatgatgtgatatatgtcgtgtatgaaaatgtttacgaactaaaaatcgcttttacgggctggagtgaagttaccgaagttttcaactcattttaggttattttctcgtgttttctcttttctctattttatgaaatcaattcaggtattataaagatagctcgggatcggttatgtcaaggatgctccaggaagggccgagttgaagcaactttgtatatatttgggttatctagaatactcagtatttatgggtagtatctattgcttaatgatgttcatttgtttgtttaagaggccattttaggtcgttatttatttgtgggccataacccacgaggattaggttatgcttccgctgacgattaaggtcatgtaaatttgtcgggcgttacgagaatggtatcgagccgaaacctagcctaagtgcggagtattagactttgcatcgcctaggtatgatcctttgggaatttagatgttgaggaagttgaggttaatttcgatgactaagaaatgataaatagagcttgagatatgaggaataggattgtggatgccattttagagtttaagtggttaatcatggacctagttggtcttaagtcatatgattatatgattgttaagaagcacgtaatgttaggtgatttttttaatagtgtttgattgattttaacttatacgatttgagttatcaaaaggctttcaaacgagatctcacaaaatgttttagttagaattcattgccactaagtttgccccttttgtttcctttgctcctcgatttcgcgagtcgagttgaagtagagacacaaaagatgatggcggaatggaggtcgaatgtctaacgaagccatgaaggcttgagatcttggtcttgttaaatgaatttagcttgttgtttaattgactaacttattgcaagtttcgaggacgaaactttttctaagggggtgaggatgtaataccccgaaccttaaacccgttttattaattactaattatgtttattagcataattacgtccctaaaatttttcaaattattatggagaaagttattttataaaacaagtatattcatactactttaatgatatttattatgataaatgattttatttacaatatagtttatgacttcaatattatagatacaagtcaaagtaaatagcaaagtttaactttttgacattcaaagaaaatgagaaagaaaaaggaatgaagggaattgttgttcagcttttccccaaacccacggtcaacacccaccacctacctccttgtcccctacattaatcttccttaattgaaccaccattcatcatctttccacctcctttcttctttcttgtctaataaaactcaactataagaatgcatgcactaagccttggaaatcacaagttcaacaacacaaaaaccagaaaatttcttcttctctcactcctctttcttcactgcaccaacccaccaacaccggtgcaccacctcgctgggtgcgccgcacaccaccaccaccgcgcaaagaccgagcaccgcctgagatgcgttgcactactgcagctccaccgcgacgcacccccccgtgttttctctcaccttggttcgctgttctgtttctccaccgctgccggagccatgcagaccgacggccgacgcgagtctgctgccgtcgccgccgacttcccgttttgtcgctcgccggagttcgccggagctcctgtccgggttgttcgtccctgctccaagagagcagaggtactagacccctttctttctttcaatttccctctaaaattctgatttcaagtttataatgctaacccacttgttacccaattgctaattagtgtagttaggcccaaatggttaaaccaacccaattcaattgttgcatgtgtattatttggacttaaatcgatttttgtaatgttaattgtgttacttagttaattgttgggctattagagtttaactaagacttatttgcctaattaaactatccactttattttattctttgacttgtggggctaatgaaaaactaaattgattaaattagttttaatgaagatacttggtctaattcttttaattggattgttttattcttatgattaagttatattatactaaatattttttagtataagaaatggttttaaatggtttatgttaaataattttcattaagcaatgttgatggcatttctaaaacaaaatgttttaagtattacaaatcaagagatttaaatgaatcgacctattaatctcttacttaatttcgtctgaataattaaatcataggttattaggaccttatggagttataaaattgaagttgggttaagtaggaataatttggttgtttagtggatgatttcgattatgggtcatgtcgtgtataattttgagggggatacatgtatgacgattcttggaagctagttatgacgatacataaggagtaagaaagggaataacgttcgaggtaacctttcatgtccaaagaaatatgtgtatgcccgtatatgttatatgtgatgttttatatatgctcttgcacatgaatacaagtatgtgatgatgattatgtgatatgattatgtgatccgattatgttttacaatgtcgatgtggcatgatgaaatatgatatgattcaatgatggatatgtatactatgaccaatgatgttacgatttatgaaacctggttatcatcattttgggtgttattcgaaatatgaacatatgcaagtttgtaaaagtggatggttctggcggcttggcattatgaactcgaactggcaaatgggcaagtcacggtggaggaattatgttacgatatacgaatgaacacggaccaaaagggtcatatgataaagttaatgctatgtccaaagccttgtacttgccaatgaactatggtcacgcaaatgttccttgtcgcagactattcaacgatgatgttttctcgatagtatttccgaacaattacccatatgatgtgatatatgtctcgtgtatgaaaatgtttacgaactaaaaaccgttttactggctggagtgaagttactgaagttttcaactcattttaggttattttacgtgttttctcttttctatattttatgaaatcaattcgtgtattataaagatagctcgggatcgcttatgtcaaggatgctccaggaaggctgagttgaagcaactttgtatatatttgggttatctagaatactctgtatttatgggtagtatctattgcttaatgatgttcatttgtttgtttaagaggccattttaggctgttatttatttgtgggccataacccacgggattaggttatgcttccgccgacgattaaggtcatgtaaatttgtcgggcgttacgagaatggtatcgagagccaaaacctagcctggaagtgcggagtattagactttgcatcgcctaggtatgatcctttgggaatttagatgttgaggaagttgaggttaatttcgatgactaagaaatgataaatagagcttgagatatgaggaataggattgtggatgccattttagagtttaagtggttaatcatggacctagttggtcttaagttatatgattatatgattgttaagaagcacgtaatgttaggtgattttttttaatggtgtttgattgattttaacttatacgatttgagttatcaaaaggctttcaaacgagatctcacaaaatgttttagttagaattcattgccactaagtttgccccttttgtttcctttgctcctcgatttcaagtcgagttgaagtagagacacaaaagatgatggcggaatggaggtcgaatgtctaacaagaagccatgaaggcttgagatcttggtcttgttaaatgaatttagcttgttgtttaattgactaacttattgcaagtttcgaggacgaaactttttctaagggggtgaggatgtaatacccaaccttaaacccgttttattaattactaattatgtttattagcataattacgtcctaaaatttttcaaattattatggagaaagttattttataaaacaagtatattcatactactttaatgatatttattatgataaatgattttatttacaatatagtttatgacttcaatattatagatacaagtcaaagtaaatagcaaagtttaactttttgacattcaaagaaaatgagaaagaaaaaggaatgaagggaattgttgttcagcttttccccaaacccacggtcaacacccaccacctacctccttgtcccctacattaatcttccttaattgaaccaccattcatcatctttccacctcctttcttctttcttgtctcgataaaactcaactataagaatgcatgcactaagccttggaaatcacaagttcaacaacacaaaaaccagaaaatttcttcttctctcactcctctttcttcacggcaccaacccaccaacaccggtgcaccacctgctggtgcgccgcacaaccaccaccagcgcgcaagaccggagcaccgcctgagatgcgttgcactactgcagctccaccgcgacgcaccccccgtgttttctctcaccttggttcgccgtttcgctttctccaccgccgccggagccatgcagaccgacgggcgacgctgaagtctgccgccgtcgccgccgacttcccgttttgtcgccgccgggagttcgccggagctctgtccgggttgttcgtcctctgctcccaagagagcagaggtactagacccctttctttctttcaatttccctctaaaattcgatttcaagtttataatgctaacccacttgttacccaattgctaattagtgtagttaggcccaaatggttaaaccaacccaattcaattgttgcatgtgtattatttggacttaaatcgatttttgtaatgttaattgtgttacttagttaattgttgggctattagagtttaactaagacttatttgcctaattaaactatccactttattttattctttgacttgtggggctaatgaaaaactaaattgattaaattagttttaatgaagatacttggtctaattcttttaattggattgttttattcttatgattaagttatattatactaaatattttttagtataagaaatggttttaaatggtttatgttaaataattttcattaagcaatgttgatggcatttctaaaacaaaatgttttaagtattacaaatcaagagatttaaatgaatcgacctattaatctcttacttaatttcgtctaataattaaatcataggttattaggaccttatggagttataaaattgaagttgggttaagtaggaataatttggttgtttagtggatgatttcgattatgggtcatgcttgttataattttgagggggatacatgtatgacgattcttggaagctagttatgacgatacataaggagtaagaaagggaataacgttcgaggtaacctttcatgtccaaagaaatatgtgtatgcccgtatatgttatatgtgatgttttatatatgctcttgcacatgaatacaagtatgtgatgatgattatgtgatatgattatgtgatctcgattatgttttacaatgtcgatgtggcatgatgaaatatgatatgattcaatgatggatatgtatactatgaccaatgatgttacgatttatgaaacctggttatcatcattttgggtgttattcggaaatatgaacatatgcaagtttgtaaaagtggatggttctggcggcttggcattatgaaccgaaccggcaaatgggcaagtcacgtgtggaggaattatgttacgatatacgaatgaacacggaccaaaagggtcatatgataaagttaatgctatgtccaaagcctgtacttgccaatgaactatggtcacgcaaatgttccttgtcgccagactattcaacgatgatgttttctcgatagtatttccgaacaattaccaatatgatgtgatatatgtctcgtgtatgaaaatgtttacgaactaaaaaccgttttacgggtggagtgaagttactggagttttcaactcattttaggttattttctcgtgttttctcttttctctattttatgaaatcaattcgtgttattataaagatagctcaggatcggttatgtcaaggatgctccaggaaggccgagttgaagcaactttgtatatatttgggttatctagaatactctatttatttatgggtagtatctattgcttaatgatgttcatttgtttgtttaagaggccattttaggtcgttatttatttgtgggccataacccacggattaggttatgcttccgcgacgattaaggtcatgtaaatttgtcgggcgttacgagaatggtatcgagccgaaacctagcctaagtgcggagtattagactttgcatcgcctaggtatgatcctttgggaatttagatgttgaggaagttgaggttaatttcgatgactaagaaatgataaatagagcttgagatatgaggaataggattgtggatgccattttagagtttaagtggttaatcatggacctagttggtcttaagttatatgattatatgattgttaagaagcacgtaatgttaggtgattttttttaatggtgtttgattgattttaacttatacgatttgagttatcaaaaggctttcaaacgagatctcacaaaatgttttagttagaattcattgccactaagtttgccccttttgtttcctttgctcctcgatttcgcgagtcgagttgaagtagagacacaaaagatgatggcggaatggaggcttaatgtctaacgaagccatgaaggcttgagatcttggtcttgttaaatgaatttagcttgttgtttaattgactaacttattgcaagtttcgaggacgaaaactttttctaaggggtgaggatgtaatacccgaaccttaaacccgttttattaattactaattatgtttattagcataattacgtcctaaaatttttcgaaattattatggagaaagttattttataaaacaagtatattcatactactttaatgatatttattatgataaatgattttatttacaatatagtttatgacttcaatattatagatacaagtcaaagtaaatagcaaagtttaactttttgacattcaaagaaaatgagaaagaaaaaggaatgaagggaattgttgttcagctttcccccaaacccacggtcaacacccaccacctacctccttgtcccctacattaatcttccttaattgaaccaccattcatcatctttccacctcctttcttctttcttgtccgataaaactcaactataagaatgcatgcactaagccttggaaatcacaagttcaacaacacaaaaaccagaaaatttcttcttctctcactcctctttcttcacggcaccaacccaccaacaccggtgcaccacctgcttggtgcgccgcacaaccaccaccagcgcagcaccggagcaccgcccagatgcgttgcactactgcagctccaccgcgacgcacccccccgtgttttctctcaccttggttcgctgttctgtttctccaccgctgccggagccatgcagaccgacggccgacgcgaagtctgcttgccgccgccgccgacttcccgttttgtcgctcaccgggagttcgccggagctctgtccgggttgttcgtcccctgctcccaagagagcagaggtactagacccctttctttctttcaatttccctctaaaattcgatttcaagtttataatgctaacccacttgttacccaattgctaattagtgtagttaggcccaaatggttaaaccaacccaattcaattgttgcatgtgtattatttggacttaaatcagattttttgtaatgttaattgtgttacttagttaattgttgggctattagagtttaactaagacttatttgcctaattaaactatccactttattttattctttgacttgtggggctaatgaaaaactaaattgattaaattagttttaatgaagatacttggtctaattcttttaattggattgttttattcttatgattaagttatattatactaaatattttttagtataagaaatggttttaaatggtttatgttaaataattttcattaagcaatgttgatggcatttctaaaacaaaatgttttaagtattacaaatcaagagatttaaatgaatcgacctattaatctcttacttaatttcgtctaaataattaaatcataggttattaggaccttatggagttataaaattgaagttgggttaagtaggaataatttggttgtttagtggatgatttccgattatgggtcatgcatgttataattttgagggggatacatgtatgacgattcttggaagctagttatgacgatacataaggagtaagaaagggaataacgttcgaggtaacctttcatgtccaaagcaaatatgtgtatgcccgtatatgttatatgtgatgttttatatatgctcttgcacatgaatacaagtatgtgatgatgattatgtgatatgattatgtgatccgattatgttttacaatgtcgatgtggcatgatgaaatatgatatgattcaatgatggatatgtatactatgaccaatgatgttacgatttatgaaacccggttatcatcattttgggtgttattcggaaatatgaacatatgcaagtttgtaaaagtggatggttctcactggcttggcattatgaaccgaactggcaaatgggcaagtcacggtgtggaggaattatgttacgatatacgaatgaacacggaccaaaagggtcatatgataaagttaatgctatgtccaaagccttgtacttgccaatgaactatggtcacgcaaatgttccttgtcggccagactattcaacgatgatgttttctcgatagtatttccaaacaattaccaatatgatgtgatatatgtctgtgtatgaaaatgtttacgaactaaaaaccgtttttactggtggagtgaagttcttgagttttcaactcattttaggttattttctgtgttttctcttttctctattttatgaaatcaattcggtattataaagatagctcaggatcggttatgtcaaggatgctccagaaaggtcgagttgaagcaactttgtatatatttgggttatctagaatactctgtatttatgggtagtatctattgcttaatgatgttcatttgtttgtttaagaggccattttaggctgttatttatttgtgggccataacccacaggattaggttatgcttccgctgacgattaaggtcatgtaaatttgtcggggcgttacactgttattgtacaactgagtcaagtttgggggagatgtgtggtatgattggttgatcgctgagggtgctaagtcttgtttgcatggaaaattgatttgtgtttgttggtttgtaacgcataaatgatatcgaaagaaaatgaattatgtttctcatgactatcttgttttgctattcggtttgggaattcatcatttggctttgtaggtatgccttctgaaaaccttcacgagaccttactcgtccactagggtagcctaggggtttaaagggcttgttgcacgtgctaagtgcaatcgtgattcctacgacagtgagtataggttttattgcttccttagaatagttttcctttttttagtctatttcctcgaggacgagcaaaggttaagtgtgggggaatttgataacacgtttatatactcattcttatgtgatatatttgtgtgttttcatcatatttttcccatataattaatctcttagagctattattctttacttttcgctattgctctcctcgggtgtatttgttttgttttttttgtaggattatgtcgttttggagttgattgggatttgcacgaaagcttggatgattgcggagcattcaaatggattgatagctttatccgtgatgattttgaagatatattgcgatatggtgttggtaaccattaattaccatgcctaaggagctacaaaatggacttttgatagcaagagaacaaaaaaacagcataaaccgccaccctttggcggtcctttcaagcttaccgcaaggccatggcggtctccaatttcaatattacgtaatcttagttttagagtgttttagcagtccaaatcctagtcaaactccttgtatttggatagatataaataggttttggatagaatttgaaaaggagattcttttagagagaaaatcacgtgagattggtttttttacttcttcctcttggtcgcttcacgttttcatcacgttttctccatactttcctcaagttcttgctttcgacattcaagtttgcaatttcatcaattaattcaagtattattttctcttctctattctatttattattattgttaatcatgctttcttttaatatttattttgtttattcaatcatcatgtgtgagtagttttctattctagggttaggttgaaccctaatatgaattgatgcttgtttaattcccaactcccaaactttgattaatttatgattcatttactttagggttgggtttaattatcaatatatgactagaaatagtatatattgaatgtgattatttttgcaacgaaagttggatcttaatcgaaactagaaccctaatttaagataaaggaagtcatcacgaaagtagttgatggaatttattaggatgttaggatgctatgtctaaagtccttaatttgcatgactccatgaaaataggcataattgcattgttagggaagctattgattgatcgaaagaaatccttagtattattagggcgcgtctatcctatgagttatttattagttaattaagggaaaagggattgtttgtggcattaatttgtattagtggggatacttaaacctagatgtctttagtctttgattcactcttgataatttcatttgctttagttatttagattagttcatcatcacttatttggattacttgcttagtattaattagagtcaatttaactactttgaatcagttagtctcttgggattcgatccttacttgcccgactacattagttaggaggaatagttaggttatttttgttaggtacgcgataagtctttcagcagggaggcttttgtgaacaagtttaggtgcgttttgaaacttccatggcagtaatgatgtggttggggggttatatagtgggttagagttggaggtcagcttggcaggtacagtgtgcaagggaagttgggtaaagtgtggcgtcaacggggaataaagaaggaggttgggttcagagagaggggtgactgaggggacgtttacctcagggctactgccatgtttcagcatgcaaggagaggaaggggctacctcctgcaaatccaaaagcatatcaaacttgttatacgtttgggcaaatgagttcgacaaatcactgggccctcctagatttttggaaagatctttataggtagcccataagatttcctagggaaattatgtaaaagtggtagttgagtattctgttgtactgccgtggagatcacctagactgggacctacgtctctcatttttctcttcatgccctttattgccttttgacttttgtctcttgacttgggcccatgtatttatcacgtcactttcctttgcttggttctcaccaaccctaatttcacgagctcatagggtttcatctttctccttctcttctggtttctttggacatctcttcatgttatggcccacccaacgacaactattgcacacctactgtttatctgagtagacgaggtcttggcatgtacgccctaaccatgcccttgccggtgtattggagttcactttcataagaacacagatggtcgcaaacctccttcggtcaccatggtccgggagattccagaggctccgagagattcacctgaatcgagtttgagtgatgctttcttgggaaggcttgaaacctggttgccaagcttgtatccatattggagagcccataacaaaccatggtccctcagtcaaaatgtgagatctcgcttccggtgatgggcattttgtattgtaaaacccaaggcccagcgatatcatctctatggtccctttccatgaccatagtttctggagttcctatttcaaataatcttgggagaatgaacgccccaccactttgcgtataatagcatcaacccaggatttaacaagctcaacatattggctcttagatattggtacgaaaacttcctcctcgccacaaagatgagggtgagaggttgcaaaaggaagcgggggtaaggggaattttgatagcgctatcttgaggtggtactccacctcactcctatctgcctctttgaataacctatttttagatgaggttgcagaatggggggagggggaataggtggacttgggagaggagggagggaatgggacgggatttacctcggcatttgctcgaacacaagggtttgcagtatgaggctccgacatctctcctcgtgttctgccagtgtgggcaggttttggtgggtttttagtgacttaggggagagagaattctctctctaagattctctctgtaaagcccattgatttcgtcttcttgaaatgactgttctattaccaaattgaactttagttgatcgaaaattccataataccatttagttcatggagcttaggataagaacgcaaaatgtatcggcatgggctagtacctaaactatcatatgggagatttgcatagcactattaggagcaaaggtggaggaagatttgggaaggcaaattctgctatctaggcgcaagctcttacacttcacttgtattacacttattacagactctactaacctggtgactttttatagggaacaaattcagttggtattgatcttatttggacattctcagattctaaatctcgctaaggagtctccaaaacataaacataaggctatagaactatatacaatccttttggtgtggtactttgtcgatcaactatctgactttcatgaagaaagacaatgttatagtgttttgttgtcaaagttgctaggatactattgtcaagtagtgtgtggaatctatgtccaatattattttgtaatttttggtttattgttttgttctttgatttaacatttataaaataatcaatcataattactccatttaatttgttcaaacatttaaagcaacttcagaaaattattgattttatttttacaaaattttaaagacattataaatgaattttgtttgattgttcattcatactttgcaattctacttcgcaacaagttccatcaaaatagaaacatttcacctttgttctacaaaaaaatataattttttcagagtacatataataagttataattactgtactatacctaataatattcccttcgttactcaaattaaagatcttcctattttcacttgttacgcatggttgtcaatctattttttgtatgattaatatctctaattacatattagtaaaaaactatacaaatatgatattttgaacgtattcaattagatgattcaaacaagaccttacataattatgttttttttcttatacggtagaaagaatttagaagattctattttttttttaatgaatagtgtcaaatttgcaaatgtgaagatcttagaagaaagaagagagtatatagtatttcatcgtaaacaaaatccaagttattttatcctaaacattgtacatgtatttaatgtttaactctctaaaactttataaaatttataaaataatgaaataaaacataggtgcacgacaaatggtgttaaataaggatgtcaaatgtcacaaactcgtgcactgcccgtgaattatgtttttatatgttagtaaatgtctataataaatttatctttactacactattaaaatcagggcaataggaggatgagtgctcaaatttgagcaataattgaaagaataattgtcatagaagttgagcggcgaagcatattaattaaaatgaggataggacgacgtgaagcacacaaataatggaaaacattttgacgcacaaaatgaatattcatttaatgatttaggtatcatggttgctaaatacaacctcactttactaatacaactctacaaaatatctaaaatacccttagccttaaaacccatcacccatttctctctaactgctcctctcttcactcccccctctctctccttccttcttcctccttcgtcctcttgaagatgtttctgatttaatatatatagatgatctatgtatgaagcaatactgataattaattttccctccttgcattttggtagagactaaccgaacttctccagattcttttatgactacaaattgaatgaatttacggggaaaataaagaaaataattgaagaagaaaatcattctttgtcggtttgtctggcatgtgctttatcccatgaaagcataatgaagatactatgaaaccatcaaatatacactgaagttatggtttttgaaaagcaaaatagcagagaacacaatactttatgaaaaacccacgtcttacaaatttccttcaatttgtgcaaggtgcacgaaacggattcaattgtttcgtgcaggttgcacgaaacggaatcatctgtttcgtgcaatttgcacggaacggaatcatctgtttcgtgcacattgcacgaaacggaagcatctgtttcgtgcagtctacacgaaacagactaatcatgcattacgaatttgcgaaaaaaaaattcacaacttgaatcataattgcgaaaaaaattcacaacttgaatcataattacgaaaaaaatttcacaactacctcagattgaaactcgattgggtcaaaattatggtccattgaatatcaaattaaaatttttagatcttcaatgaagttttttaatatctaacagttagagagaaggagagaatatttttttagagagagaaatgattttttagaaagaatatgataataaaggttttttggggtttttttaaggctgcgttagtaaagtgaggctgcgtttagcaaccccctttaggtatttatctatgcatttatgtgttaaagatcacacaagaaaacacaacacggacattatcacaataaacaatggtaaaaagtaatagagccaatttgttcaatcgacaactagagtcatagataatgagttggtgttcagaagacaagttatgatcaaaagagaactcgttgttgggcatggacaatgcatcagataatttaataagataaaaaagatgtatagtttgatattagcattttctcacaagcacaaatcatagtttcgtggtaggatcataatatgaggacaaagtaagatttcacgggtcagagacctcttatgctatgttcgagacaatacgacattattacatcaacgtatgatgtagggtgacatgtgatgacgtacaatatttgcccacacgttttaaattatttacataattattgaccaattatctgacttattatgactattaatctgattcacaaggaaggcaattattatttatttatagggttaatttgaagcatgcatttatattatttacatgatatatttcattggttattgatggttgttagtacagttccttttttttctattttatggggtcaggttgttagtataactagtttttaggcccgggctacgctccgggtacttatattgttcatctattaataatttaattttaaaatgattacaccatatatcacttggtgtagtggtaaatgtatcttaattcttattaatatgtcatttgttcctttgaacttcatctcctaatttgtattctcgacaacaacaataagatctgattagcatcaagaataatttataatgctgccccattaattacgaagttgtggactctaatgatcatggtgaatttcgaaaggagagatggaggaagggaatgactgcaaaaaaagaaatcaaataagaaaaataaactttatggctaaaagtaggcattaagtgccacattactaattgcaatacatatctataattttgtggaaacatgaatcactaaaagatgttagattagatggtaaatctttggaaatccttacttgaggtcaggtgttcgagtccaagcttcaacatatatattttttaaaataatgatcacatgacttaattactaattgcaatacatatctataattttgtggaaacatgaatcactaaaagatgttagattagatggtaaatctttggaaatccttacttgaggtcaggtgttcaagtccaagcttcagcatatatattttttaaaataatgatcacgtgacttattcttggttaagatatgtgggaaaattgacagattgagggtgccacgtggcacatagactttgcattagaaatttgaggagagtgccacgtggcatctaggcattctttcgcacgccttttaatatatatgtatagattagaactttataattttattaatagcttagttgaataacaaattaaattagctgatccttcatgacaattattgtcaaggaacaattgactaaatattctctttcagacctagctcaaaaatacaaaagctctcttacaccacctagaattattaattggtttggtactgaaaaggtattaattgctagataatatactccaaacatgaagcacacccaaaaaaaaaaattgatgtgatgatgcacacccaaacttgaaatcaatttttatttttaaaatcaacattattattatgctatactgaatgacctataatttgtaagcaatagattttccgacaagcagtggttagtgaataccaagaatacaataattcattttacacaaattcttggggtgtaacaacctataaaccatcgcttcttttttatataaaaaagaactaaaataatatgaaataaatggcataatgacaagaatttatgtcattatttgtatagttcatgacattttttattggagtctatgccattatgcatgttacacaattagttattggtgcaacatgtgacacccaaaacgcactcgttattatgtaaggcactcgttaatgcgtttaataatgttgtgtggtcttatgtaaactgtagaagcaataaggtagcttgtgaattagctcataaagcttgtttggagatgaatgacgctatttgggatgttgattttcctagctttgtttcttttggtgcttgttccgatctattaaagtaagctctcctttaatggatttcctaaaaaaaaaaaatcacttaatcaagttaactcaactacctcccaatcatgaaatgagaggattcgattctcattgtctaaactataaagttgacatcatatgcgtcgtgactcgtggttcatttctgtatggattaatgtcgagttgccgacttattctttatataaatgatttggatttcttaaatgctaattccactccaatttctatggcctaataaattttaccttagacaaccagaataaacaataagcacaattatcgaaccgtctctttttttgaagatcttatctgtaaaaagttttttgttttactaacattccgcaaccgttacttataatttactccaattgccacccgttactacaaccactaccttactagttactaaacactcgtaattttcttaaataacgttttaatcttgtcaaaccgctattcattaccttaaatactagtgtcaaacagggcctaaccgtacagactagtctaacattctaaccattatactttgtggacatattaagagaaacttaaataatggtcactgtgcaacaagattccgtacaatcgaataggatttgttccgaaagaatcaaaattcttatttgctgaatgtcatcatcttaaaatgcatgatacttgaatattattatggcaatacttgttttatatggctgcccaagagccacctatcattttttgatgacttaattatgggtgccctgaatagttatgtagtatgagaagtcaatcataaaagtcaatgacaacccttaagggactttaattaaaaagaagtccaaatttgcatgagttggacaaacttatatgcatatttcatgcaaagttatgaacatttcttatatatgaccatgtattaaaaactcttccatgattcctaaaaaacacaaaaaaaaaaaaaaacactcttttatgaatgagtttttaatgagctaaaattaattttaagtgcattgaaagttaggtatctcaaacgaggaaagattataaaaggggctggtaagggtctggtcccacttaatttgagaataaaatgtcaaatacacaattacaaaccttataaaccatgaaatttcaactgacctagtggtgaagcaagcgagattaattgcactacatattatatgtgcgtgtaagtttgaagttgatatcctatatatatcaaaagatagtgcttgactgcttgcactatttattatctaactagtattttggcttgggagatgcctcggattttctctgtgctccaatttagtagtagttaaataagtcatctcattcattttatggatttcaatagttttccattcatatatcatcattaattttgattgaaaaagcaataattgtatggtgaagtaaggcttggatctctttctttcatactttaggttgtgggttcaaatcttcacgtcaacaatcttttttttttttactacatgagaaagacgtggataaaatgtaattgaatgacggatggtgacacgtggcacatatacgttcttaggaacgccttttgatatattagtacaagctttttctacatgatatgcgtgcggtgatattttagtcttaactattacttggtataaaaagaaatgaaaagtaaaattataaaagtacgtatctacgttcaccttcatttggtgagtaagaagtatttaaatacttacaaatagtatctaaaaacatttgaaaagtaactataagtgacaaaattgtatattcaaataatgaaaaaattgaattttttttggagtttgtatttgtgattagtctctattgtataagccagggggggctatggtgtcccccaatgaaatgtcttttttgtccttagcgaaatatatacttaattgaatattcaaattttatacaactatatcctttcctaatttaaagatgggtcaaattttcaataatatactaaataagcattaaaaaagtaaattgacatactaaggaaaataattactcaattaaaaaaaaattaatttgactataaaacttacatctaaatgtttatctcaatttctaaacactttataaattacagtagtttgtataacaataattataaatcacacttgtataattatatgttgaagaaatttgttaagtatagatccaaacaatcaacgcatgcatcgcgtgcatagaagactagttttgtatgtgagttgtctttgtaataagaatgcaatatttttttaattgtctatattcatttttggtaagttttttattacaaatttttttagttgattggatctaaatttaatttgattgaatcttttttattggcaagtttatgtgattgacaactgtatgagttgattggatttaatagagatttggttgaattttttttggtaagtttatatgtgtaatggttttaacttttatgttatggaggggtgaatatgtaaattcaaaggggaacaccattgctccgcccttggcttatataatagagatagatagatagattctatctattccttcttttaatttcttcttttttaattggtttttttctcttaattttttcctatatcttttgcttctagcctatctctttcccttattttgaaaagtccttttcctttatggttaccattttagtttgcttaacttattacctttgaagagtgactagttttttaacaatttcaaactgtaattaatatttgggtttttccaccaaatactcccgacaaattacaaaattcacaatataccctcaatgtttcaaaaagtgcaccgtatacccttgagtttttgaaaacgtgcaccaaatacccttttcccaactgccgttaacctaccgttagctttatttacgattttgccatcattaagccctaaccctaatctaacctaactctaaccctaattcttactctaatcctacccctaaacccttccccttaccctaaccctaactctttggctgcccccaccccagcccctcccctcccccacccccgctgcgcgtccgttcaccgctagcctcccccaccccgtgcgcgtccgttcaccgccggcctcccctcaccccttccctgtcgatttcccggccctgatttcacaacccttcgaacgccaaacccccacctctcccctttgaactctcaaagtctcaaacataaatcaccttgctatggtcggcggtgaaatcggcggggctgggaatttccgatagttggggactcaaattccgcagagaaaattcgtgtgtgctttccggttgttgcggactcaattttcggcagcggttttcgaattcgaaggtggggggggctcgaatttggccgcgaaaactcgaatctgaaggcgggtgttgcgtcggtggagaggagggggaggggtgcaattggagggggagggggaccggtggagggaagggggtggggagctggtggagggtgggggaagggtgggttacggtttagattttagggttagattaagattaaggttagagttagattaaggttagagtttagggttaataatggcaaaatggtaaattaagctaatgctgagttaacttaagttaaaaaagggtatctggtgaatgttttcgaatagtcaggggtatatggtgaatatttggaacattgagggtgtattgtgaattttgtaatttatcgggggtatttggtgaaaaaatccttaatattttttttctcaaataccttcctaactgtttttcgatatagtatttttaaaaaaatggtgcatcgatacaaatgttatgcttttattttgctgtgagttcataaaacgatttgtagttgatttcattacaaggaatgaagaggaaggagaaaagaaatggggggattttaattatggtattaattgaattattttttcctagagtagttttgtaaaaaattatcctaattaaagtttcttatcctatatcttgtagcataggatagaaaaatcctagaaggattcaacaaaatgtaattcggaatttgcgtgattattcctatatatcctcagttcacaatgatttactcgtcatccttattggcacacttcaaaaaaactttactcttttcacttttaaccaatttgggcgataggacccaccatttattctcctattatccaatgtcacatgcatgattatatttctcttctttatttactttttggaattgttgccgtctcattattggcgtccaaaagtacatattgttgacttgcaaattctataatcacgaaactggacacaaaggttgcaacacctttgagtgggtgtgtttctagaatacctttgtctggttctgcctttcgctattgaagaaaaaaaaattagtgctaagctctacccattattgtgattaacaacgtaaccatcaaatcaaaacgaatagagttaatgaaaagaagcagttgagtaaatgctcaccataattcttgtcacctcttcaatggaagttgtcgtggaagagtgatgatcgccaacttatgagtagggtggagagtagagttctaatagaggagagctctcctctccattagaactctactctgccaccctactcacgagtcaaagaataaaaatgggtttttttgtttactttaaggtaaggagggaaataaaatgaaaaggagaagggataaaacaaactgacaatcattgggaagaagttaacaagaaatgacggaaaatcgaaaaaggtttcatttcaaaaaaaaaaaaattggtttaaggttgtaagttgaaaaacaatttaaaaaaattggtttaaacaataccacatattatgattttctaatgacgcttgcctcacataaaaacacttgtatgaaacatacatttgtgcattttatgacaagcatgtcatattattgtcgttacgtgaaatatgtgtcactcaaatctatatatacgctaaagtgcacaataaatgctaactacatacatgtattcgacctaacattttctatataaattttttttatacggatcaaaatgcttacattaatttcttcttgaaaattatataccaaaagatattccaaggtgtacctcacctcaaaaaaaaaaaaaaaaaaaaaaaaaaaaaacttaagaccttgtccaacgatagtaatagaaagcattccataaatatacatatttctccacataaaaagtcataggtataagatttatttattcataaaatcggctaatctaagctttaaattgcaaaggaaggacggctgttcaatttccacacacatcatctttctcttcctgcaggcctctgctctctcattctctttacaacttttgagcttaatgctctcacttgccttcctaatataatttcattctctttaatttcttcaattgcttttcttcaaataaagtgatttatattattaattattatatttaccgttagtagttaacttgttaaaaaatatatcctaaaatggggtacaaatcattggacaaaacaaagcatagaaaaggtttatggtcacctgaagaagatcaaaatctaagaaattacatttttcaacatggccatggctgttggagcagtgttcctattaatgcaggtacattttttatttgataatatttataattattgtacttactagtttttttttttaattgcatacccctaatattgttgttatagtaattatgtttttggtcatttttttagatgacttgaaaattaaatagagccttgttcaacgtagaattatatgttcttacacatggcactattcttctattccttagactttaatcttatatactaaagttttcaccactaaaccaagtaatgtttgatgttataattttaaagtaagatattaataaataaaaattataattacctgagacataagcatatagcccgagccaaaaaaaactaatttttctttatattgaagcatttttcttttatatatgaccccattgctccagcgttgcttatatttgagtcttttaattatcaaaagttattttaagtgcatggtttcttaattattgatgaaagaggtgaatgggagctgcattatgagtaatgtgaccatttccaagctgcttaatcatagctaatttctacaaacttctttttcaataacaacaaataatgtatgttcacaaacaaaaaatttggggtgccatttgagtaatgagtatgaacggtgccacatggtgtagtccatgtacaataaaaaaaattagaaattgtatagtataggttttgatcctgtgacctcaagttcatgtactaaagttttaaccactagaccaagttgtatttagtgttatcatatcaaagtacaatattaataaatgaatttttttcttactcggggcatagcccgggcctaataactagttttatagaaaaacttgaatatgatattgcttaagataaaaactctcgcttcactattcgtactaatggttattcccaccttagatatttatagtctcatgacgactgacgtcgatttaataatatactctagtttatgattagattttagagctatttagagatgtaagggatttcttttattaaagtatctaattctttgttttttctcaaatagttgtacatttaacttccatgattgtcaatatgcatgttacgttaatcattaatataatatcttgatatacatagtattaaaaatcatcagtttttgttatgtttaaacgacatgtttagaagaattaagtaaaaagtgtgctataacattataaaaattatacaaaaaaggatttagggtaaataatttataagtaaaattaaataattatttgaggaggggcaacttattagaggttgagacttgagactatgtattatgaactgattatggataattggagtttgatcgtggcaattttcttttttgttttttttataagaatgattcatgtggatatttatttttggagagactactaaattatattcctctaattatacttcctcctttaactaattctttatcacaaaaagattttaacagaaaaaaaaaagcgcagaaaatatataatagcaaaattttttatcctccaccttaatttattagaaaatgcaccttagttcattagaaaaaggacctttatgttgagagcacaaacgaaggatgattcaagcacttttggttctttttggccagaatagaacatactattagaataagtaagacagcatcttgagtcaaaaataactagaatttaaagtgtacaagcaaaagattgtgacaatgacgtaatatttttaataaaaagtaaatatacaattactccaattgcttttcaagttgacatttatctgagaataattacctaatcattcttcttagtctttagaatttagaattttctaaaagatagttacttcctttgttttgtttaaatgcaataaaggggtatatttgtcagatacaaaatatttatttattgtatttaaaataaaacggagaaagtatatgaaattattaaactgtacttactttaattttcctcataattaattatcattcaaattttcaggattgcaaaggagtggaaaaagttgcagattaagatggattaattatttaagaccaggacttaagcgaggcacattaagccctcaagaagaggatacaattctaaaccttcattgtgctttaggaaataagtaagtgcaatttaaatgatatctcactctaaaaaaaaattccaaaactttgcatttataattggaaacctttcagatgtaagagttaattcattacagagtttgtcttgtaagagaccgcctacttttaaattaaaattaggaaatggtgagcccaatattaaaaagagaattagctcaatagtaattaggttaatttctttcagtgactaatttaattcgtttagtgactaggtctatttttatattaaaattagaccatctcttttaatgatttttacacattacatcacaatataaagttgattttacaaaattatttctctagaaaggtactcatgacaatttagcaattggcaagaacttgatttatatgattataaacttatatgtggtttccatgaaattggctaaattatgtggtagaatgaaatagagtttcattgggggcatgaatttaccaatgcaatgtcaattttttttattaaagttgctttattttggcagtctcctcctaggttaagttactcttggcatcaagccatatttgaacatgcagacaaatgctaccagctactataatgccaacctaatgagaaacaaaagcattaactaggttacctcttacccctaaactatgatttatgactaaattaaaagtgtgattgtaatttgtatagtaattaaccaaaagcatcatatccctaaaaaaaagcatcatgaagcaactaggcaatacatggctaattcaatgaacacttccacttttaaggtaattttttcatggctaattcaattaaaaattcatgaggggttgataataatatttataatcacttttctagtgtaatttcacttttaattagtaaaaatcaccatgactacatcaaagaaaagcactagatatacaataaaaagagttttaatcaacaataattaatttcagctaaaaaatgattagtaaaatcaggtttgatagaatatacgcaaatattatcgtcttgtacctaatttaggctaatgtataacttttataactaaattaggattgattagccatgtattggagtatattttctatcaaggtcaatcaattataaaaacactttgtagactaaaaattaggtgaagtgaaccaagtcatagaaatattttctttttactttacgttatgtcgacctggtctaacaaataacttattaattaaagaaatccatgtcaaataaaaatgtaatatttagctttgtttctcatatcaccaatataaacactaaacaatccaccttaataataactgatttgcaggttcctaggaagacttgatcttaacaaaaacttggctcaatcacttgcacacaatgcatgtaagctagtcttagggcatgtttggttcagctttgaagagtctcaagaaacggaatcaaaaatagactacatgatcaggtgtttggtacaattttttttgtttccattcctttaccttcctcaatcctactccctcaatttgatacccttctcactcttgcgataacaaataccgttaaagagaggaaacataaattcacctttacaactccactgtgggtcacctagtcatctgatcagcacaagaatttgaagaagaaaagcgaaactggaaaaaatgagctttgtgggtttgaagaagatgaagccaattgatgagagagaggaaagaaatacacggtagtgtgaaagtgcgactggaaggttaagaaaggattgggggtttgtgggccttgttaagaaaatggtaaccaaacaaaattagcaaaggaatggattgggttaaaacttattccattcctctaattcatctcattccattctgtttgtttttcgaaagcccaaccaaacgggcccttagagttgttactaggaaggcacatccaaatatccaatccctaagttaactaatatgtgcaaagattttaaatttgattaccatacatttctcccttgattattacttcctccgtgtttttattcttgctacatagagaaagtgggaggtttttaagaaaggtagagagagaaagtaggggaccaccactttttgattaaacaaccatttgttaaggaaaaagtatgagtattttaaaagagaaggtggggggaccaccaacttttttaataatattttaagatttttatggtgagaaggaaaccatttatggtatgtagcatctattatgacatttccatttaagggaaatgtagcatctataaaaaaacggaggaagtacttatgaagaagtagcatggcatgattggcttaattatactatgattgggctttggacccttatttgagctctttaaattaccttgaaatttggcccacaatgcattgtccagctttttaagtctcattattctcttttcatatacttcctctgtttcatattacttactatacttttcaattcacggacttttaggcaatttttggagaagaaagaagtagagagtaaaaagaaaagagacccatgtgagatgagagaaatagaaagagtttattgcccaaaaagtaattgtaacaaataatgtgaaacttcccacgatgaaaagtgtaatgagtattatgagacggaggaagtacaattagtaagtggagacatattttattatctaaccatgtctctctttaatatttttttctaatagatggtctcaaatagcattacatttacctgggaggactgataatgagatcaagaacttttggcactcatatctgaagaagaaggttgctaagacagaaaaaatcaagcccatctcagaaacccagttcactgaagaaattgaatcaccaatgaaatcaaatacgacgatttcgagtcttgattcatctggaaaggcagaagattatcccatggatgtcactcaattagctagcaacaataaaagtttcctaccaaaactcttctttgctgattggtttagcttggatagtattagtaatgagcaaattaacttccaagattatcatcaatattatcctaattacaacagtagtattaaggatattgataatcttatcaattataatatgaatcttgaagaagatcttcgtcaaggagttacatacaatgaaggatcatgtagcaatgatgagttacgtaatgaagcacaacatgcgatatttgattcacagttcaagattgaagatcagactttggagacaacgcaacttagcgatttattatatgggaacgaaacttcaaataattgtttcgtagaaagtaattcaatgtatatataagggactttagattatactacatttaaaatcaaaagcaactcttggaaaaattattgcataattagtgttatttctctgggtatgaggtggactaatacaataagaaataagaatgaggcagtacatatttattcattttgaattagacttttcctcttcttacaacgagtcaggatcggcttttaccatgtttaacatgtttcatggcacaaggcccccttatatacgagcgtctcaaaatagagaaagtctaagtagtaaaaagaaaaggttatgggctactttcttttcataatatgattatatgaagtgaagaatcatgaatggatgagctattacattattgaattctttaaataggaattcgcacagagcctttatatagttcgagacggtcctgcaatgagtctagttacttactaacctaaaaatatagatttcttgagatactgttggtaaatgataagaagatccaccagataaaagtaaagatatactcaaattcaacgaagagctaaaatgacacgcagagcagctaaaatatgtgtaacacagcatacgattctaccagaacttacagagcctcaactcctgtttagagcatatttatatatgatttagttttgtaggatattttggggtaatttatgtgaaaagattaaacaatataagaggttataacaataatagctcacataataataaggaagcaacttacttaaattattacatgaaactcttacacactcttacaaactcttttactatgctctctctttttggagcttggcacaactcacgtaggttttgctgcacactttgcaagcaatgcactacatctatttatactattacaacatactattcatcttacaactttcacactaaaattgctaaatgtcaaactttccaactatagcttgtagggtgggggtaataggtggcttgaaaaaaactcacccaagtattagatgtagtggtaataattaaccaagaggagaaagagtggacggtgcttattcaacactccccctcaacgactactctctcacagagatagtctagaggtcataccaagttgttttcgaaacttttcgaactttggtcctccaagacctttaaatatatctgcaacttggttctccgtgttcacttgctcaagttcaatctcaccccgtagaaccttctctcggacaaaatgataatgtacctccacatgttttgtccttgcgtgaaaaacaggattctccgctaaacgtatcgcggacagattgtcacagcataacttgattccccgatcaattggttgatgcagatctttgagtaattgcgtcaaccacacacactcttgtgttgccatagccgccgctctcatattccgcttccgtacttgatagtgacacttgttggttgtctcttactacaccaagagactgcccgaacccgcattcaacacataaccagtagttgatcgacgtgtgtcgagatcaccaaagatagtcgacatcacaagatccgacaacttcaatctctttatcattgcgatgcaggattcatagtcaatggttcctttcacgtaccttaatatccgacgtcgcctcctcggggtgacgtttcatcggtttttgcatgaatcgactaatcacactcaccgcataagcaatatccggtctggataacgtgagatagataagacttcccaccaaccgcccgtacatggtcacatcttctagatctttgccttcgatcgaacataaccttgcattaacctccattggagttgacataggcttgcaatcgaccattccatatttttctagaagatcacgggcatatttccgttggcatagaaatatcccatccttagtccgctccacttcaagaccaagaaaatgttttagttctcctagctccttcatttgaaatcgcatcaaagattagctcttgtttgttgaatctcctcttcaaaatctcccgtgatgataagatcatccacatatacaagaactattgccaactttccatcctcgagctttcacaaataagcttgaatcggccggtgctactgagaataaccactctgtaacgtaaactccgctatctttccataccaggcgcgtggtgcttgcttcaaactatagagcgccttcttcagctttgcatacatggtgtggataagaccgattctcgaaccccttaggttgatccatgtagatgtctctatccaactcaccatgtagaaatgcatttttgacatccatctgccagagcttccaagaattactagctacaagtgctagtaaaacacgaactgtagtaatcttggcaactggactaaacgtttcatcgtagtctagcccatattgctgagaaaatcctcgagctaccaatcgtgccttgtacctttcaatggtaccatcgtctagtctttactttgtatacccatttgcaagaaataggttgaacttctttaggctttggcactaactcccaagtctcattctggtgcagagcttgaatttcttcttccatggcttttctccaatctctgcttcgagctgcctcatcatagctacttggctctttttgtaataccccgaacttttaactaattttattatttactaattatgtttcttagcttaattgtgttctaaactttttcataactatcatggttaagattattttctaaaagatggttactttaattactttagaagcaatgtttgttgtggcaatacttattataatatagtatatagttttaatattttcctaaaaatggaaaatcaccatgaccacacaacttatcttcttcctcaagcttcatgtccttgctccccaaggcttctagaagaccttgctccccaagtattcttcaccattaagtcttcattagtttaatgaagtttttcttcctaaaattactataaatagtgggttaatttcaccatttttcatccactcgaaaatttcaaactataaccaaaacctccatttacaccatcaaataaaaatcttaatttccattgatgtgtcttattctttttgagtacccatgaatggccctaaatacccactctctttctcgtttaattttaggttgtcgtactgtttttccccaatatcgttttcttaaagtcagaatctgcatatacttccttcatgaaagttgtagatcgtgaaaagttattgaatttagacccaaaaatcatctgattcggagttcggagtaaagaattagaccctctgtaagtttatattgttctaaggtccattttacttcataaaataatcatacaacctaattatagtttaaaagagattgacatagtcattattactacaccttaactactcgaatggtgtttttgattaataaaattatagtttcatgctcacatagttattacttaagtttatgtattataagtactaattaagtacacttggattataagtataatgttagtaagcttaaatgactatagtcccacttttagcttaatgatatgactatcacttcttaagttgtaaattaaataagtcacttatacatgggtatcgagttagtatgaaatatcactaatacaagttagagtttaacaatgagttagatatcactttactattaaaagtctaactaaagtgtgaaagttctataatcataccttcaagtcattaaacatgaattttcatgaatcttataagtagtggttgttactaaataaatagttttacataagttagtgaccaagttaataaagtcaagaattatagtttaagtaataaatggtgataatggggtttcataactattaattttagaaactcactattaagttatattaaagtcgttcctataatgggcacatgatagaaatggatcgtagagcttaaagatctagaataaaatatattaataagtcgtcctttattaattcttaaatagattagaaaggaaaaagggacattacaagcctcctccggctatcaaatataatgatcgcgactcgagataacgtctactgctaacacccgcactccccttccaactacgttttatgacgcttttacataatattttgatgatatgtgtttatggattgcgggatatgagatgttttgctaaatgatgtttatgatgataaattggtttttcatgatgattaaaagatgttttatgacgtaaatataaaaatgacgaaacatgataaatgaaagtgaaagacggttattggtagtactttatgggcaccacaagtgtcacctttgttgtgaccgcctttcggatatgggcaccgcaagtgtcacctttgttgtgaccgccttttggatatgggcacctcaagtgtcacctttgttgtgaccgcctttcggattaatgttatgagcaccgcaagtgtcacctttgttgtgacagcctttcggattaatgattatgatgttatgatgttgtacttgccaagttaccattaaaaatgatgtaagattataaaggataatatctcaaaattgttggttttctattatcaagttatatgtttatgaaatgatgtttgcgatattctcctctccctattttcaaataaaatgagttgaaatgaatttacgttgttagagtagtatgttactgagcctcggctcatgacgttttgttttctgttttaggtatggcaaagcatatgcaagggtgatattagggattacgttgaagtgactctacatatattaatttgggatatttagaaatgtattatgagtaatcattattactctagttgagagtttgtatatatacttttagagaccattttaaggctattattttatttatgggcccatgacccacagcttaagatctgtttccactgtcaatcacgagtaattaaggttatgaattctcggggcgttacacttttatatcctcaaccattgcagcatttgcatatcttggatttggctttttctgccttgtggacctgcgtagtgctgggtgaggttcttcttcttcaaaattttcaatttgacttggccttttttcttcaatatttctatgatgtgctcctgtttgccatgaacttttctctctttgttggtgtaggttgagatatctccatctcaagactaccgccatcttgactagaccgaccttcgtctttctcgtccatcttttcttgaaacttttcctcgatctccttcgagtccgcacaatacagacttgtggtgaccaccaagatgatgcttcatcaaacaccacatttcgtgacatgtgacatttatctgttattggatcgcaacacctccaacctttcctctgatcatcgtatcccacaaagatacaacgaatagcctttttatcaaacttgctaagcatattctcaggaacaaagacgtagcatacacatccggaaactcggaaatggctcactgctggcttcgcgctgctgggtgacactacctccatgtcgaagatatgttcctcttcaactgcgtaggatgcttgtgcatcccactcgacttcacttcggttttcatgctccaccgaagttgcagcattcccttcgttggtttggaccaacagcctcgagcatagtgtcccttcttcttgcggttataacacacgacatctcgtcgtgtttgatttttcccttccttctcatcctcgttgtcgatcttgtcgagctccccctcgatggaagcctcctctacgttgtccttttctcaatccccatgacctgctctgtttgacttgccatgttgatacttgacttcctttgtcttatcacctcccttatttgacttcttgttgccaaaaagagctttctcttcatccttgacataaactccagacatctgattttctagagcctcctggttggctaacacattctcaaactcaattagagatggttgtgtagcccagcctcggatcgccgtgacaagactactgtatccaggctttaagccacggacaataatcctacgcatccttgtctcgtgatggaattttcaggatctaactttgtgatttgctcacacaaagttttgactttggtgaaatactgcgttcaccgtcatgttgttctacttggatcgacaacaactcattctcgagaagtcgaagttgagcatcgttcttcttagagaacaaagctgcaaggatgtcccacgcctccttgggtgtcttcgcatccttgatgcggtataacaactcgtcctcgacggttctttgctagcacgtacatggctcttccgcccctaatcttccacttctttaattcttctggatcggttggtattgtaacttccctaccaccgactataccccaaagatcttgtcccaacaaatagaattgcatacgtgtgctccacttactataatttctattgttgagtttctcaatattactagatgaactagcaatatctgtcatttgtgacttggtgttgcccggcaatacacaagtaagcttggtccctgaccaacaagcttcacgcccgactgtgcactaatggaaaatcacctcgcaatacggtccccgaccgttaagttagccaaagatatttttgactacatcgttgcgataatatcggtccccgaccgatatttgccaaaaaatggtcccaaaaaatgataccaattgtaggatattttggggtaatttatgtgaaaagattaaacaatataagaggttataacaataatagctcacataataataaggaagcaacttacttaaattattacatgaaactcttacacactcttacaaactcttttactatgctctctctttttggagcttggcacaactcacgtaggttttgctgcacactttgcaagcaatgcactacatctatttatactactacaacatactattcatcttacaactttcacactaaaattgctaaatgtcaaacttttcaactatagcttgtagggtgggggtaataggtggcttgaaaaaactcacccaagtattaaatgtagtggtaataattaaccaagaggagagagagtggacggtgcttattcaacaagtttgctgcaaaatgttgtttaagttttcagaatatgctagctctaagcttttcatgctcatgcaatataatcgtgacattttaatattttaccagtgaactaaaaaacagaaacgaaacaatttggaaattaaatgattaactaagcaattaacagctttaagagactaaaaacagtataataatatctgctaatcagaaaatcagtagtaaaaaaatcttacacacagcaaactttacgaatttagcaagtcgggaagattataatttattaatcaacgaattctaaaacagattcgactagttgacaaaaattaaaagacctgcaaattaacaaattcaataacacaaggaaacaatccataagaacactactaatgagacaagaaaaagttataaatttagttaagggaatttaattagcttccttaccgagttgatgagacgagttcgactggctctctgttggtgatcatgttgatgctcatgatcaccattctattaataaccatgctgacatgtcaaacagctagcttagctaagtttgttacagaaagtttgttacaagaatgttagttacaagttagttagaaagtggttattacaccctttttgtaaatagttgagacactataaagagtgtcattgagttctcagcagctcattaattcactactgaaaataaaatcttctctccctccttctctctataattctctctgaatgaatcatcaaaagttcattatggtatcagagcaagttacggttctgctcaaataattctggttttcttgttacaattacagaaatcagaaaattcaaagaaaaatgatcaaacatttccgcatttcttgatcatcattcaaaagattgtaagtgattcttctctctaaatctgaagaatttattcaattcttgaaatcgtcaaattcttgaaagagtttgatcagaataaaattcttttctgaactctacaattgatagagtttcagttgtaaatctgtgaaaatttgtttttcacaagaattcttaatcaaatctgtataaagttggatttgattttctttcatcctatttcatcagtttcttcaaatcaaattgaagcaatatgcctgaaaatactgaaattcctgttacacaagacccttctagtccatactttatcaattcctctgaaaatacttctctgcctattgtatctgagaagtttaatggtgatgctttgggtgaatggcaaagaagtatgattattgcactcgccacaaagaataaactaggttttgtggatggtaccattaatccaccaccttccactgatcctaagtttgctgcctggaaaagatgtgatgctatcatcatatcttacatattgagatcccttgatacatctatagctagaagtgttttatttctgactacttctagagaaatttggctagatctagaagaaaggtatgcacaaacctctggtcctcaattgttcaatttacaacaggcattatcagaaataaaacaagatgataatacctctattgctgatttctttactcaaatcaaggctctatgggatcaaattaatcaaatgaatcctatacctacctgtggaagtacaacttgtacatgttctaaagttttctttaagcaacaacaagaagagagacttgtgtttcttctcatgaagatacataacaaatatgcaaatgtaagatccaatattcttatgatgcaaccattgcctgctatttctgttgcttacaaacttttgatacaagaagagaaacaaaggcaatccagcttgttagatgaagataataagaacaaaatgggatttgctgtagatgctagaagaactggtggttatgcaggagggtacagaccacagggcaataattctcaaataacattgcagtcaggggcaaataaactggtggtcactggaaagaaacctagtggactgtcttgtgaacattgcaaatacactggtcatactattgacaagtgttttcggatacatggatatcctagtaattttgtgcataaaggcaaaggcaagaagattgcagctatggtacaaggtgcaacagaccaacaatctgattctcacatcactcacatctctgaagatcagtatgatcatcttatgaagattctcagaaatcaatctctggagtcaactcagacagaagaatccaagcttatatctactcctacacaggaagctagtgtgaatgtagcaggtacttgtcttctttcttgttcaaattctaattggatagttgatagtggtgccacagaccacatctgctccaatatagaattatttgatactatgcaagaatttaagcaaagtcctaatactattacaattgctgatgggaagcaagttgtagtaaatcatatgggtactgtgaaatttgacaatggtatagtgttgcagaatgtactatatgttcctggtttcaagttcaatttaatatccactcacaaattatgtagggatttaaattgtgaaatcacatttactcatgacaagtgtttacttcagggaccagcctcctctcattccctggttcttggtagcttgtcttctggtttatatgcagtggatgatggttcaactaatgtgcagcaaaatattgtggccagtgttacacaaaccaagattgaggatgcaaagctctggcatctcaggctaggccatcttccttttaataagctgcatattcttcatccttgttttagtagttcagttggttgtgatacaatatgtcaaatttgtcacaaagccaagcaacctaggctatcttttcccatcagtacttctagagcttcttcatgctttgaacttctacacatagatacttggggtccttataaattgataacacatgatggctgtagctatttccttactattgtagatgattgttcaagaattacatggacatttttgatgaaacacaagaatgatgatgttcctatcttaactaatttctttactatgatagctactcaatataacaacaaggttttggctgttagaacagacaatgcaaaagaactttgtgaaggagatatgttgcagttctttcttgcaaatggtattattcatcaaagatcttgtcctgacacaccacagcaaaatggtgtggttgaaagaaagcatcgccaccttttagagacagcaagagctctattttttcagtcaagggtacctgccatattttggggagagtgcctgttatctgctacgcacctaatcaatagaatgccactgaaaagtaccagctattccactccctatgaaaagctgaatggtactccaccaaaccttgaccacttaagagtgtttggttctctctgctatgtttccactctcaaagccaccagatccaagtttgatcccagggcctcaccttgtgtctttctaggctacccaccccaccaaaaggcctataaagtgcttgaacttgacacaaataaaatcattgtttccagggatgttcaattttatgaaaaacatttaccttttcactatgacatctctacttctaaaccttcttctcctatatttctgccacttgacactccttttgacatgaatactatcttatatatccctgaacctttaatttataccacagatagcctacctgattcccatcctatttcttctcctatttctcaacctgcacccaccattccttctcaacctctcagacattcttctagaccttccattaaaccagcctatcttgacaactatgtgtgtgtagctgactctattacccatcattggtgtaacatagttagtttcaattctcttcctttatctcttaaagctcttctcacccatacctctcaaataactgaacctgtcagctactttgaagcctcacagcaccctagttggcttgatgcaatgcaaaaggaacttgatgctttaattgctaatcaaacttggatcatggtgcctcttcctaaaggaaagaaagctattggatgtaagtgggtctacaaggttaaattaaaggctaatggctcagttgaaagacttaaagctaggctggtagctaaggggtttactcagaaatatggcttggattacttggaaacattctcacctattgttaaaatggcaacagtcagatgcttattgtcctttgctgcctacaatcattggtctttgcatcaactggacatcaacaatgccttccttcatggaagacttgatgaagaagtctatatgaaggctcctacaggccttcacaatcctgataacttggtgtgcagattggtcaaatccttgtatggtttgaagcaagcctccaggcaatggtttgctaggcttaatgaagaattacaatcacttggttatgtgcaatccaagaatgattactctttgtttattcaaagaaaagatcctcacatcatcattgtggctgtttatgtagatgacatcattgtcacaggctctgatgaatctggtattctctctttcaagcaacaccttcatcatgtctttagcatcaaggatcttggtttgctcaatttcttcttgggtattgaaattagtcatctccctcatggtattctgatgactcaaaagaagtttaccagagagcttcttgtggactgtcctttctctctttctaaaagtgctaaaacacctttacctagcactctcaaactacacattgatgttggtgatccatatcatgatcctgagctctacaggtgcctggtaggcaagctcaacttcctttcccatacaagacctgaactaagttatgctgtccaagctctcagtcagtttatgcatcagcctcttttacctcatgttaaagccctcactcatgtgctcagctatgtttctcttactcaaggataaggcatcctacttcaagctaccactcagcttactctccaggcatattcagactcagactgggcttcctgccccagtactagacgttctgttactggctatgtccttctcctaggcaattctccagtctcctggaaatcaaagaaacagtccaccatttctagaagctcaagtgaggctgaatacagggccatggctgctactgcttctgagactacatggctggtcaggttgcttcaagagttgggtctctctaatcttgcacctgtgatcctacactgtgacaataacagtgctattcacattggaaagaaccctgtcttccatgaacgcacaaaacatattgaaatcgattgccatttcgcaagagagaaagttttagagggtctcattgagctccatcatcttcccactgcagaccagattgctgatgttatgactaaggctttgccctatgctcagcataccaagctcatttccaagctaggaatgtcttctgagcagccacctcctagcttgagggggggtgttggtgatcatgttgatgctcatgatcaccattctattaataaccatgctgacatgtcaaacagctagcttagctaagtttgttacagaaagtttgttacaagaatgttagttacaagttagttagaaagtggttattacaccctttttgtaaatagttgagacactataaagagtgtcattgagttctcagcagctcattaattcactactgaaaataaaatcttctctccctccttctctctataattctctctgaatgaattatcaaaagttcattactctcaatttgaagggttttagcctttagggttttagtcacatagaacgcgagaaaggcacatgctggagttattttctatccccatcaatttatttgttgtggccttgtgggctccacttaggctccgttcttttgcactgggagaatttgaagtgaattttttttttattttttttgaacgagaaatttcatgaatttaaggccgaacggtatctaacagatattaaagaaaaataagatacaatcaaataagcttatatcaaattcgtcctcgaaataactacaatgaaccaaatcgacaatacagtgcaactcctttgcatttgctgaatcaagcagctattgatgaggaagtctatcatttcgacatagtttggaaaaaaaatcttaatcgagtcatgtttaccgcattcgagattccaataccttcatatagagtcttgaacttcaaccaatgagaataatttctcatacccaaaaataaaaaacatactcacaactcccataagggagaaggagatcttcacaacaaatactagaagaatccaataaaaagataataatttattcaacagaacaagaaaaagaactaaaaattgaaaataaaagggaaaaaggggcctaccatggatgaaaacatccacggcagcccataactgataaagaaggggtaggggaggctaggattttagagagagaaaaaaaaaagggcgactttttattgtcccaaaagcgagttactccctctgtattttattatctttctcacttagaatcttgacactattcacaattagagagaatcttttagatttttctcaatatataagaaaaaatatggtcatgtggggtcttgtttgattcgtctcaatgagtactttattaatattcaattattataatttttactaatatgtaatgaaagatatttaacgtagaataaaagtcgttggcaaaacgcaagaaagtcaaaaagaggaaagataaaaaaatacagagggagtaacttttaaatctcaaattgaattaaacggaactgaaaaacttaactgagagagattgaactgaacataaatcttaagaaatgtctttattttttatttttttagactctaactttttgttgactactagcttctcctcaaagcatatggaagcagcccatcaacagtgacagaacattcaagctgccatgctggcagcctagcctgtgtcagaatatatccaccagaaaaaaagaaccttcctctttccaaattccaactaggtttaagtttataacggttttaattgttttttgcaaaagatgattctcgattggttaagcatttggaacgactttacctacccaatcaacaaaatctaatataatactccaagtctccaactgtgttagattccttattttcttatcaatgtcatttgaattattaatcagaaatccaaaaaactttgtcctgttcttatattttatgatcaatttcgtttttaatgtatcgtttaacatgtttgaccttttggactaatagatgttcaatttatagttttgtgaaagtattgggtcaaaccgtctgaccaatacatattgtcagacgggctgcccagtactgtacaattttaatttgctttgttacgcagagcgagtaccccttctctcatattgaagaaagccacttttcagaatttgaatttcagaaactccactccactcggcgcatctttctctctcctcatcatctgtttcaatctaggtttcggaaagttgagctattgctaagttctttgattcagtgacaatctcagtcactgaatttcagaaactccaacaatggcgacagatggttgtgaggtgatggaagaagacatttgactccaacaaaaagacctcatgaagacctcataaaatcaaaaagacctcatgaagacattgatgaagaagacgatgggataattacaacaaaaaagaagggaaaatttttaagagaaagagatgaactccaaatcaaataggggagtggtctgacttttgaaggtgataaaattttgtgaaagaaattgcaatgcagaggtggtgacgggaggagagagaaaatgatgttcggtcttcattcttttcctattttccaatttcgattggactttgttttgttttgtttgattggactttattttgtttcgattggactttcttttgtttcgattggactttcttttctttcgttagactttctttttctttcagttagactttcttttctttcagttggaccaaccgaaaagaaataatgggccaactgaaaaaaaataatggactaatcgaaacaaaatgaagactactcaagataaatgtagactacccgaaaaagaataaagaccaatcaaaacccaagtaagtctaatcaagcacaaaaacccactgaaaaacaaagaagactaactcaaaacaaaatgaagactacctgaaaaaaattggaaccacctgaaaaaaaatggagactacctgaaaaaaaattgaaaccacctgaaagtcgtccgaccaagattatggtcggacgagtccgacacaatacgttctctatagtttttgatcctttgaaatccaataaccttttatgtatgcgcaatttcatacatctgattgatataaacttgcatctttgtttgtgttgcaccaaatttgttacttgcattttttgaaaattagattcatagactagagaatttggttaagaataatttagtcacaaaattcaagttccaaactttaaaattatacttgagcacgcatcatgaatatacgatactcctatacagtatacatgatagatatcgcataaatgtttatatagtgttccttttgtacatagaatgatgtcgggctagctcatctcctccccgttagacaagaatttttaaggttaatcacgctgaaatgtttgagattggatgattttgctcatctccgagatggagttattccaacactagtggattttaagaataaatcccactattggacatgtaataatatccactatataacatatctccagcagaaaaatctatgaaatcacttcctaatgcactttgatccttgaacctaaatggtgaatccagcattcccttccgcaaatcatctccaccatcctcacaaaacttgtcgctgctcgacgacgagccagcttcattaatatacccaaaaccattcagaaattcatcctgtttctctgctgtgcaatcaaaaccagttttttcagaagttagctgataattaattagcccattttgccctacattgttactaattggaagccaatcagcaaaagcaagtttgggtagaaaactttcatggctttgtacttgttctccactttcaaaagatgtatttctttgattcaccagaaaatcattttcttctgtgtttgagatatcagcaaatttaggttctgtataagtagcttcagcatctctagaaatacttgctcttttcttcaagtaagagtgccagtagttctttatctcattgtctgtccttcctggcaagtgttttgctatttgagaccatctgctcaattgcatagaataggttaactttattgtatatcaattcatcccctatttgagaatatataccataattatagagatggaaaataggtcgtatggactagcttcgatcagtttccaagacatatctttgacctacgatatcttctatctcttattagtaaaaaatataaaaagttgatattacgaatttacacattgagatgaatctaacaagacccctcatgaatatgttttttgttatacattagtaagaagatttggtcaaagtttttaaaatttgactctcaaaatagaaatggaaactatattttggaaagggaagaggagggagacaccgaaaatggtaaatccttttatactcttgagtaataaaataaaaattcaccaccattataccctctattaccaaaatatttacatcatcattgatttattgggtttcaaaaaataaaagaaaaatatacaataaactttattaatttttcgtatacattattacgcaattaatcttttatttattttcgcacgcatcgcgtacataaaagactagtaatatttacgtcaacagtcaacacaataacacaaccaacaacttctaaagtttgtacagccttttccttaacatattctattagcattattcctagattagatgtggaacatccaatgatatcacctatatagtattttacttctaccaatagatttcaagacctttgttttttcattttgtcctttttgttcaagatgacttgcaaattgaatttggctatttaatttgactaaatcttaaatatctcatagtcaactatgtaaccagagtgcatgagattagcgaaaaataaaatataacacgataaaagttacatatgaacactttggaaaatctaatactataacaccaactttaaacacaagtactataataatgtctttttcagatatttccgtaagatggggacatattcgaggagccaatgaaagattaattcataatcaactgaattctttttaatcactcttacagatctatcagacgttgaacaagattaaaagaaatgtaattaagtatcactgcagaataataatacatcataacattagtctaattacaaatgattaagcatctttttaattcaaaggtgaaaatgagaggagttaagaaagttacttgttccctaaggtttggtgaagagtcagaatcaatttttcttcttgtgtgctaaacatgcctcgtttcaatcccggtctcaagtaattaatccatcttaatctgcagctctttccattcctctgcaaccctgaacaagaacaagttattagtatatctatagctgccgcacatggctacaataaaattgacatgaataatctcaatttttacaagatttctcaaaataatcctaattttgaattattttggaataataccaactttaggaggtaccttctcaaaataattcgaactataaattttttgtgtattataaacctaaaatagaagtgaaatttcttaaggtaccttaatgtttggtttaattctcaaaatacccttattgaattttgaagtttaaagtttaagtttcaagggtactgtaggaaattaatgcactcgaatttcggtatatgataagagtattttgagcccaaacacaaagttcagggtatttgagaattccccaaatgcgatggataatttgaaaattacgtcaaatctcagggatatctgagaaaatttcccaaaatagaatagtgtagataagaaaaatgatagtttagcttattttgagatgatcctctcaaaaattggaattattgatctgaaataatccaaattttgaattatttcgaaaagacgaataaaagttgggatattcatatcaattttttctttattatttaatttgcttgtaatagttgttgaaagagaatattgtccatcatgtcatattaatattagtatgttacgtaattcgcagtaaaaagaatgggtatgcagaccaactaacgcaattacatatgtttgttacatgtattgtttcatgacgaataagtactttgcttaactcatacatactacacaaatggttctaaactacgttactggactcttcttatcatcccgaggtatcaattgttagatacttaaaaaacactctgacatatgtggatagttggatactaatgttatggaccaaagaaacggacgtgtctgacactattatctcatacttgtgtatcttaacataagtacgtatttttgtaacataaatactaaacacaaccatgcatatatatatatactctgttatttggacttttcatttcaccttaaatacttgtgtcggatttttagacttccacataggtatatataaatactttgttataaacgagtttgacaattggcggaagcaaaggaaaaataacctagaaatctgataccatgaaagaatatcttccttgcctttcattccatgtaacgtaacaatatatactgtagtttacaaaagtcaaatcctataaactaggaaactaactctaaccaaaaatatgcacaataactaatatacatacaatattcgaataatgaaaatatgactatttccatatattctagcaaaaaatatactggtgtgggacaaaagtactcgaatccaagtaacacatctcgtgtgtttattattagaacaatgatatctaagaataagaaaatacaagttaatataagtaactcagatgaatgcaaaaaagaaagaacaactaacatgaatgaatatggttagttttagttagcattgctatcaaactattaacttaccagcgatgagaggcacagaactccagcaactaatgccatactgaagaatatagtctttgagcctttgatcttcttcaggtgaccataatccttttttgtgcttttttgttggtttttctgaagatctcaaccccatttttgcaaattagtaagaaaaacaagctgcttagggtcaataatgaaataaaagtgtaggacaagcagcccttttgcttggaatatgaagcaaagatgacttaaaatacagccgcccaaattttctctattttaaaagggaaaaaaagataatgagattattgtatcttaattgtcatttagcacaaagataatcatgattttactttttaaaaatttcatttaaatgagtaaacaacaaaacaaatgctacttgtctctagtatgttaaaagccattgttataatcatttttgtgaatgtctatatttttataggggagtaggggacttttgcctttagagtaatttctaattggcccttggaccacaaaaacttagtctttgcttaggattccttatacaatagtagtataagttatttagtaaaaagagaaaaaggaatacaaaatttagctgtagaaatcaattaaaaacttgtttttcttagtttagattcactaattagcaacttaattattggagaatcataacagtgatggttttcaagatgatgtcagcacaaccgtaattactaggattaaaaaatatgactctttactaaagttcgtttgattagagactgtgtacattattggcttactgtctatattactcgaatccacgcactcttattagacacgaatactactagtgttatgctctatgaaactagcaaacttatatcacactcccaaagacgagttcttaaaattggagacttgtgcaacaatgattgattcaaatcccaaagcagactcctgactagcaacctgcacaaaagggacccaccctggaagtttgggtggtatttccccctccgaagcttaagtcagatgtcagggatgtaaaggaacctttagagagagaaagtagagagagagagagagaagaatttatgacagagtaacagtactatgccctcaaaaacgtacctttcaccctaaaatcaaggactatttatactgtttgaaatgactgctgtacctggatgccaccctaatttgggagcatctgattggccaatcaaagttttgggacacgtggcggttaattggtttaacacacctcactttcatataaaggtgtaaatcatgcttactgggcctaagtacaatttttttggggccagaagaaggtctttttagtacactttcagagaaacgtacttttaggcctgtcaccttcaggccctttttgtacttttattcccctacatgcatgccacatgtaggactcagatgaggccacgtgtcagtactagagccgttgatttttaggctacaacatttgccccttaaaagagggagttattatcttttgggcgccaagacggttaatcttcctcttttaaccgacctgaaactgctcattccctttattcaaaaaagaggcgcgattttgccggtctccataggtcaaccttgggcacaacggttacttttcaccggatgaggaggtcattttcaccttctataaatatgtgccttagtcgctcctggagtcattttaacatcgctgagaaattttctagagagagagactctgcagatttttactgagcttttagagagaagaacaacttccgtccaaattcttactttgctcgtccaaggcctcaagtcatcttcaacattcgtccgaactttcccctacaggtatattctcaactctttttcttgtttgcacacatattttaagaaaatggattcgtcctcttcctcgaacaattccggccgctcaagggttggtgctaaccctagaacagagggcctaacttcctcggcatcttctagagttggtcctatcttggccgggcatgcattctttatctttagccatggacggcaaagtcagacgacccagtctctacctgtgcaaggtaatctggcgcgcgtcaagcaaacggctcgcatcagaagaggggtaaccatgccggcctctagttctgaaaaggaggaatccactgggcgaattccggccgaaggagaacgagagacccaaagcgctcgtcctgcctaccaaactccttctcctgaacatgccgaggaggaaccagaaatcaggggctccccagaagccagcccgtccatgcataggacgatctcagatgagccgaggacggctagctcttctgaccctgctagtggctcagaggagccattaaccacttcgtctgaaataagacggcggctaggtcccctttctgaccctaggttcatcctggtcgataacacatggctgggacgattaggctcggaccttagacctttttcagtggccatgcccatgcctggctaccactttgtccttcccgaccgagaggacactatcttcagtgctccccccggccattttgcagtttatcggctagcattagatgccggcttgtgctttccccttcaccctttcatcacccaacttcttcaagactacggcataggacataatcggcttgcccctaactcttggcaaaacatccccgaccttttcggccgtctgcaacttaaagggaaaggacccttctctcgccgctttcacccatattcactatgttgccaaggtccctaggaccattgaaggaagctcggccgaaggcgtgtgcaatcgtcaaggattcttgacgtcttgggataagacttccaagatgcactcatggaagggcgagttcctcttcgtcccggcacccaataaagcggtggcaaaccgtcttcggtattttagccggacaactacaaacactggacggatggcctcatacctggaactggagagtaactctaccgaagagatggtggagtacttccggatttcagagtatactatggaagatgtttccttcaagggtccgtccaattggattccttttaaggaaatgttttaccatgacaacttctagtcgctgccttactacttacagagacgagagaagaggtatatcaactaagaatcttccaagtaaaaatttctagacttgcttatcattcatccaacacttgttttattcccttttgcgattcaccaggagcaaattaaggaagtcttggataggagacatgagctcgtcccagtttgcggatactctatggaaggagtacagtaagtcaggtgccgaaaagagggccgacactctggtaagctattgtatatgtatacattttttttttttttttgaaccggccggtctgcttcttcggagggtaacccgtcaaaatggtgcctggacgacttgtctacccatggggcaattcgtccagagaaacactggacgagctatcttctcaagaagcaactcgtctagattgatcccttgacggcttgcttcttaaagggacaaatcgtgcggaatagcataggacgagttactcatcccgaatagcaacccgtctggttgataccttgacggtttgcctcttcgaggggcgatccgtctagagtagcgttggacgagttactcatttgaggagcaattgcccctggttgataccttgacggtttgcctcttcgaggggcagtccgtctagattagcgttggacgagttactcatttgaggagcaactcgtcctggttgataccttaacgtgtattctaatctcttcctttttcagaaaaatgccccaacctctaaggctttggccgaaaaagccgcagcaaagaaacggccggccggcaccagtgaggcccctccctcaaaaaaggcaaagggctttaagaagaggaagaccacacggccggttcccaaggtcgtcatcgagctaccggccaaggaggaggccaaagaagagccggctgaagctgactcccgggccctcgtggcctatactggtccggccgagcaacccacaccttcacaacctgacgaggttgtcatattggacgatgcgggacaatcttctcagccggacgcggccaggacgagtccgcctttttcggggcagtggcccaactcgtaggccgagatgtcgggccgcttatagggacggcttcccgttcctcctctggtgagtcttactattccaacgtagttagaacactacgggttggcgggcgtccgatgagtccgtccaacaaagcagaccgtggttattcccatcgtgtgtactgacgagtctaacctttcggataaagggaagggtccaaatgtgttgacggctcccctagcctctcgacgatgaatcttctccagctttttggaaagatgtcttcgtccgatcgtgagaagcttcaagacggagctgttcaaatgctttcccgaaccttatattaaggggttaaggggagcatcgtctggacatgtaggttacatgtctcaacttgctgccgaggtacatctttcttttcttagacgcttatgctttatacttgccatttattttcttttttcattcgtcctgacatgccttatcctttcatgttttcagcttcttgctcgcagcatgataacagaggactgggcaaaggagctcagaaaagagaacaagaagctcgtccatgatgtgacggcggccgctgatcatgcccggtttgctatggccctcaagaagaggtgctgcatcgccagaccaaggttgcgctgaaacacggtctgccgagctagagtctcagatcaaagtctaccttcttcggttgacggagatgctggacgaacgagcctcattggaacgtgccctgacggacgagaggaactcagtcatgacgatggctgctgattttttcaaggagaatctcgtccttaaggtcaagaaccaagcccttcgtactgaggtggccgagaccattgctggcgccaaagaggctatgaacaccgtcatagacacctcaaaggaatgggcaatgcaagcttttggcatgatggtcgaagaggaggatatccccggatatactctcgtcggctggagttccgaggaggctttgcataaggcgactatatccgagccgaccctcccgtctttgaagaatcttcccaagatgaagagggggaggacgatcttgaggcccgggatgaagaggacaatgatcctcccgccgcttagttcctttgttgtatcttggccgtgagccacttgtaattttcctccttttgtacttagatgaatttaggttgtaatcatctttttaacatttatgaaaagccatctttttcaatctctcttgttctatgctttacttgttgttgacatattaccttacaacctcatatctattataagtacaaaaacaactcgtcataatatttggccggtctaatcaactcttttggccgatttcatctattactattattaaagccaagtataaaagtaattcgtcaatcattctgaactgacccagtagctcttttctggacgttcataacccgacgctcaagcaaagacttgcttttaatttttgaattttaaaaactgtcaaagtctaaaagtttgttcggccagaacttgggtgtcgttcgtcctttgaacaaagattgagtcaatttatgaattatgcccctatatgccccccttcttggacaaagagtttttagaacttttcccggttcaagaaggagttaagaagataaacaactaagacgagcggtttatgccagaagcaactcgtccaggcagatattctgacgggctgcctctttggagagcaactcgtctgaatgatagttggacgaactgattcttggaaaaactcgtccatctttgtggaatcatgaaataacttgttcctttactaaggttgttatttcgaagttttgtggcttttggacggacagtaagatacctttactaaggcgtcctatttccagccgaccttgtttaggagatgtttaactctttaagtaaaattagttagctttcgatggcagtatgtaacttaagcaaacaattcaaacaaagtcatagagaagtagaattgtattatatgaagtttgcttgacggatagtcaagatacatgtctacattctactttttcattgtaatgcattagaaaaagattacaattttgctggatgctctaaacaaagtatttcttcaaagtgtcagaattccacgtcctaggaatagaacgcccgtccaatccttcaagacgaaaggtaccattctgaacgacttcgattatcttatagggcccttcccagttaggagtaagcttgcctaactctttggctcggccgaccgcttccatttttcttaggacgaggtcccccagtgctaacggacgtcttgcaactcttttgttgaagtctcttgccattctcaacttatacagttgcatcctcagcaaagcattgcccctgacttcaggaactaagtctaaagccgtcctaagagcggcccagttagcatcttccgagtacatcattactcttaaggtgggttcctcaacttcaataggaaggacagcctctgagccatagaccatcatgaaaggagtctctcctgtggaattcttggccgtcgtccgaattgaccataagaccagctgcagttcttctacccaaagtccctttgcattgtctaacttctttttcattccggccgaaaggatcttgttaaaagcctccacttgcccattagcctgtggatgagctactgctgcaaagtgagctttgattccttgatcagccaaccattgacgaagcttgggtgtttcgaattgcggcccattatcaaagacgatcgactggggcatgccaaaccttgtaatcaagttcttccagatgaaccctttgacatcattggtggtgatgccccttaatgcttcagcttcaacccattttgtaaagtagtctacactactattacaaatttcttctcgccggcaaagaataggaaaaggcccaagaatgtccatcccccatttagcaaagggaagagtaaaaaaaatgggcgtcaagtaattggacggcttttgatggatattaccatgcttttggcaactatcacacttcttggcatagaggagtgcgtcttctttcaaggacggccaaaagtagcccgtcctgagagccctttctgccaaagctcttcctccaatgtgagaagcacaagctccctcatgcaactccttcaaaacgtccagaccttcttttcggctgacgcacttgagaagaggccgattatatgattttttgtatagagtctcattccacaattcaaaccacttgtccctcgctttcacatatttggcctcaatgggatcaagaggcagacggccggttttcttgaactcaataactggacgcatccactcatcatctcggctgagaaacaatacttctccggcctcaatgctcttggccgtcttgacctcccaaaagactgttctaggaacatctccttcaccgagctgaccagtttagagagggcatcagcttgatgattttccgatctgggcacctgatccaggacgaacctctttaaagacttgatctcgctcttgaccaaattcatatacttgctcatggatgcttctttgcattcaaactcaccattaacttgactaacaaccagcaaagagtcagttttagcctcaatttccaaggctccaccgctttgcacatttttatgccgctaaaagagcttcatactctgcttcattattggacgcctggaatttgaacttcatagcatattcgaacttatccccttctggagattgaaaaatgattccccacagccgttagcagtagaggatccatccaccataagggtccaatgacgccttcctgctgttggatcctggacgctttctatcataggccgagtaagctctacgataaaatcagccaaagcttggcccttgattgcctttctaggctcaaatgttaaatcaaacatattcagctcaacagcccattttaacattcggccgaggcatccatcttatgcaacacttgcctaagtggtcgatccagtatatacaaagatgtcgtgagctaagaagtaaggtcttaacttcctaggctagccatcaacaaggccaggccgaatttctcaatggaggaatatctgttctcaagcatctttcaaagacatggctcacaaaatagacgggtatttgcaccgcgtctctttcagccaagaggactgcaccgatcgcgaagggtgatacagccagtatacatacaacttttcaccttcggccggaccgatcaacctaggcaatgccgaagatggtctttgacttcttcgaagcgccaactcagctttttccgaccactcaaacttggcattctttttgatagtagcaaagaaatggtgacatttgtctcctgattttgagagaaaccgtccaagagcaaacaaacaaaccgtcaacctccgaacttctttgactttggacggcgaagacatattcataatagctctgaattttgtcgggatttgcctcgatccctctcgatcaaccaaaaatcccgaaatttcccaaagaactacgccgaacacacatttttgcggattaagcttcaacttaaattttctcaaggtgaagaaggtttccctgatcgtccggatgatcattttcctctttactcttgacgatcatgtcgtcgatataagcttccatatttcgccgagccaggctgaaataccgtattaatgagcctcgaaatgtagccgagcatttcttaggccgaaaggcatcccgagccatccatacaaccctttctcgaacgaaggaagttttatcttgatcgtccggccacataggaatcgatggaagccgagtaggcatccataaagctcaagggcaggcatggccgtagaaatcaaccagacgatctatttttggcaacggaagtcgtccttaggacaagccttgttcgaactgtataatcaacgcacatcctccaagtgccattcggctttggaaccatcacaatatttgctacccaatctgggtagtatgtttcccggatgaatttagatttaagcgacttttgaacttcctcgtcaacgaccttatttctggccggccccgatgcctcttcttctcgaataggcttttgccccggctcaatgttgagcttatggacggccacttcgggtctatcccgtgcatctcttctacaaagataggcaaacacatcttcaaattctcgcagcaacgcaactaaggcgtcctgaatttccgatctcaaaactgatccaattttcaatgtccttttcggacgctctggatccaaacaaatctctactgaactttccacaggctctggacgttctagtcccagacccattatagccattatttcagatgaatgcttttcttctttaatagccaaacactttctcttcttgctaggcaatagcatggacggattgctttcaggtagaggtgactcttgaaccttctcaacttccttcctaagctcaacaatttggcctttcatcttctcggctggaccatcttccttgtccttctctttccaagaggactgtttaagtgtggtgagatagcattctctagcagcttgttgatctccatagagagagccaatcctacctccatcacactcaaacttcattaacatcgggtgggtcacaataatgaccttgatgtgatttaaggtaggtcgtccgagaatgacattataggcggtcaagtctcgtactaccaaaaatttcacaaaaagcgtcctggccgcatctttttctccaactctgacgggcaaggtgacgattcccataggatgtatgacccctccgccaaaaccaattataggatgattgactggcatcaaatcgtttttgtcaaactttaaacgagacaaacaatcaagaccgatgatatcggttgagcttccaagatcaatcaaaattagcctaaccctaaggttggcaatcttcatttccacaaccagcggatcatcatgaggcgtcctaatatttcccaggtccaactcggcgaccactatttttggaaaaggatcgactcggcctggttggtgagcataactttggccgagttcccttaaatagtttttgtggccgcgatttgtcggacctccaattgcaaatcctcccgagatgaccatcactacatcctcatccgtgctatctccgtccatctttcttccccgacggttatccctttttgaaacttccttcctgacgagggtaggtaattgttcatctttccttttcgagccaactcttctagtgctcgcttcaagtgcttgcattcattggtttcatgcccataatctttgtgaaagtgacaatacttgctcttgtctctcattacggtaaggcgtcttcatctcggccggcgtctttagctcatgctgatcttttatctccatcaaaatggaatattgatctttattgaactctattggctcaactgaggccgccggctctgaccgcctgcttctcttggacgaggtggtcatagaagtcattgcccaagtctcagccttcttgggcggattcttttttggctgaacagcttcttcaactttcttcacttctggctgttttgcttcagcacagacctctgtggcatgaatgaatgcttcagcctccctcaatgcttccgtcaaagtagtgattttcttcttcaccaaatcaaacttaaaacttcctggtcttagacctctgatgaaggcgtcaaacgccacacccgcattcgatcttagatctgcaacgcctctagattaaatctcttcacataacctctcaaggcctccttaggaccttggatgacttttcccaggtgcatgcttgttttttgttcttgccgattagccacaaaatgactggtgaatagaatactaagttcagtaaaattattcactgaattaggcggcaagttgttgaaccatttttgcgctactcccttcaaagtagctgggaaattcttacaccaagtagcatcgtccaccccttggacatacatccgatgcttgtaaggcgataggtgatcgtccgggatcgagtagttccgtcaaaaggttcaatggttgggagcttaacctttgggaaaggaggggactccatgatcccgaccgagaaaggagtgggccaattgatgcggagtgccgccacctgcccctcgacgggtatgtgctctcgacggtactcttttaaaaccggattagatgaggtgttcgctaaggcttggccgcctgtacaccataggccgcaaaactcgtcttctcttgctcgggccggaaaacggatggaccacggccgcaccactgctcgggcgggagccttaaggacggatccttcatatatggcgtggagccgaggccgaacgctgttgttgtgccgccgccctcttggcctccaagtactcccgggcatcggtctccatcatgtgaccagtgggagggatattatctctggccggacggaccaccggttcagtccatcttcctcctagaatcacttgactgcttgctactttcctttggaaggcggcttagtcaattctcggccgaggtggccgactaggtcctgggcgaccctcttgggatcgccctttgagtggcgcaatgcctcttctctctcggactcatccgaaaaaaatagcatgttgttcttaatctttctttccataacaagccatcctcgcctcggaagtcattcaatacattttccaaatgaccagcagtcactggacggtcaagattttcttggatgactggagttatagtcctaccctcgaggtgaacggcagcatggccctgatccctgcctcgaggtggcctctcgtcatcaacggtatcatccacctgaactctaaaacttatgttccttgccacattcgaagagtgacagtccgtcattgttgcgtctccccacagacggcgccaaatgttatgctctatgaaactagcaaacttatatcacactcccaaagatgagttcttaaaattggagacttgtgcaacaatgattgattcaaatcccaaagcgactctcgactagcaacctccgcacaaaagggacccacctggaggtttgggtggtatttccccctccgaagcttaagtcgatgtcggggatgtaaaggaacctttagagagagaaagtagagagagagagagaagaatttatgacagagtaacaagattatgccctcaaaaacgtacctttcaccctaaaatcaaggactatttatacttgtttgaaatgactgctgtactggatgccaccctaatttgggagcatctgattggccaatcaaagttttgggacacgtggcagctgttaattggttaacacacctcactttcatataaaggtgtaaatcatgcttactgggcctaagtacaatttttgggggccgaagaaggtctttttagtacactttcgagaaacgtacttttaggcctgtcaccttcaggccctttttgtacttttattcccctacatgcatgccacatgtaggactcagatgaggccacgtgtcagtactagagccgttgatttttaggctacaacaactagttcaagtatcaaattcggctatcttgatatagatttctatatatgatccatattgatgtatgaattgtctaattattgagtaactgatacatatattgaagccaataaaaagtgtgtaacataggccatagccacatatgacataggtgttagcttaggataaaaaaaaaaaaaaaactctagttggctgaatttttagttggtcaaacaaatatacgatagttatggaatcaactcatcaagatagagtgacgttacaaagtgcctccactaaattcatgggataaaaatttagccaaatattcatactatcggacagattgatcataagtgcaataagagcagtacttgttatttataaatcaacttgtgtatatgtgtgttaaattttactttttgtccaaaaaaaaatcagtaataactcaaaaatagtaaaaattgcatcaattagcgttatctttttccccccaaaaaatgcaattgaatatttataagaatccttttttgtgttgtttaagaaccaattatctataaatcatcttatttatgtaattaagatacttatcatttgtatatttgttaatttgatgaaattacaccattatccctggtcactcaagctgagaactagctagctaatagtgtgttaactgttatccgttatcctccctcgtgaagtcgtgataataaggaaggaaacaggacagctacccggtatctgacatgggttactgtcatacttaggtagtcaaattctgctagggaagttttctttgtagataaatagattatacttcctccgtttctaaataagtgcaacattttttatttttattcttcacaacgtcgttattttaaccattaatatcttcaattatcaataagtaaaaattataaaaagttgatattaaaaaaattcacattcagacgaatctaacaagatcccatatgactatgtttttcctaaaatgtaaatcaccaaaactaattaaagtttaaactgcgaatagtaaacactatgcaaatgttgcacttatttagaaacggaggaagtgtttaatcttatttttgaagttgataaatttagaacagtgggttctatttttatcagtgaaattacgtcattaatgaagttggatcgatactataacctttgccctgttgcgcaattaatttatatacttgatcaagataaagatggcagtcaataacaaccttttgtttcttgaagtggttatatattcaaaagacaccacatgttggactactagtctactacagagtacagattactgtattttttggttcatacataaatacatgtctctatactcgtatatctgtcgacgcacttttatgctaggttgtacagagacggatactgatacaggtttcggttcgggtataagaatgtaaaataacaaattttaaaattttaggaataggcagacgtacccatataggcatacaggatatgtatcgtatcgggtacgtgacatagcagaagtgctcgtttaaggtaactatttttaggaattcttgtggggatttaagtactataagcggaatttcatgaagtcatattcataagcacttaaaacaagatcacatacatatacaatcaaggatcacataattgtttagaattagcctttgaagcttgatttacacgaaatttgttacaatccggagatagaaccgcaaatgtgattcatctacttggtccaccattccggatcaacattccagcaatgctagttggaaggaagaatatttttcttctatttcttggagttaaccgtgacttttcaaagaataagagagagaagaatattgaaagagatcttgtatcttatccttgtgattgcttgtacaagtatatttagctaggttagaaatctccttccctctcccctcttggccggccatcctagagcccttttggacgctaggtttttcttttattgatccaaataattatgtgtgacctaatatgatccatttaattgggctctggatttataatttactaacacggagttctatagcattctctagcaagacgtatagacgacacaatttaataaatttattatctccataatacgatccatattatatttagtaattgcattaaagtcgaggacataattccttttaaattcatcttatatattccagtgttttaataccccatagttgcatctcttcagaaaagaacctcatacttaaaagtaaaaacctcatgaagattttccttatcaaccctgcactgtatttttttcttggatcatactctctctgtttcctaaagatcttcccacttactgttccgacagataccaagaaaaatcaagttgtgtggggcatggtgtgagtaaagtaggagagagaaaggggttaagatgaataaacaaataaaaaggggttaaagtaggagagagaaagggagtaaaattaaattaataatgtaatggtggaccatatgatagtgacatgagagggtaaatagggaaatttgttttgccaaataaggaataaagcaaaagagggaagatcttttggaaacacccttaaacggaaagagggaagatctttaggaaacggagggagtatatacaacctaatacttccaatagattcatgtacaacaatcatttatttaaggctttataagtctctgcaagtacaagactaggtcagtaggtcaccatctggaaagaatatagatacaaaaatattattaagattggaatcctaaaattagtaaaaaaaatagttataattatgctacaacttagtaaaaactaatattaagaatttctgcacattaatattaacttgtcattctcaaaatggtgatagtagtttaatctctattatataagtgaaaggggagagaaagataatgcccccttaaaaaaagtctgatatactcttaatgcatttgaattgctatacactacctctatattttttttaattgcatcatttaattttgtgccactatttatcaactaagtctgttaaactatctcacattattatataagaaacaacatagtcaagtggagtcttgttagattcatctcaatgcgaaaatttcaaatatcaaattttaataatttttacttatacccaatataagagatattaacattcaaataatcgcctcgacaaatgtgaaaaagcaaatgttgcgactaaaaaatacagaagtatcttttttcttcctacttgccatatatattgaacaagttaacaatggaatgtaatttgaaattcaattaaatattaaattgaggagaatgattttctcttcttacatgtgtgaaaaactctaataaaaaaaaattgaaaatataacttaattgacacaatcaaaagaaaaaaatacttgaattttatatcataagtatacatataatattatttaaagcctaaatattgattaacttattataaaatagagattcaacgattgaacctgatatacaaattcttccactttatttgagacaagctttcttttctttacatatccttctctcaatactacatttgaataatgatgaaaaaataactaaaaaaactaacaaaacattaacttaagaaaagcatattaaagaaattaataaaaattagtaatgtctattcgaatcattttttgtaacactgatgaataattaattgagaaaaaaacgtgaatatgacacgcacgcataacatgcaaaaaatgttagttctctaagattgaagttacatgcaagttgcaatcaatatctaataggagaaatcgtagaattgtagcatcgtaaaatcatattaagatcctaccatgtgaatttttataattgggtaggatcgaaagatcttacaaaattaagatcctctacaggatcgaacatataaggtccttatggatcgtaagaatcataggatagtaagatctggatcaaaattttaatgaccatgagacatttgggtcgggttagaagtacgcctataatacaaaattaattaaatatagtaagtagtaacttttttttgggcccctttgggatcccattgataagatgaaagaccatgcttcaggcttagtgtcaacgtgattaagaatgactgttactatatataatcaattcaaaaaaagatcttgtaaccatttcatcatgcttgataattttatcaaaaatcttaaaaaaggaaacgaatagacttacgcatagataagtcgtacactatatcccaaagacttttcaagtccaaatttttcttgtcgtctttgcaaagctaatacctcttatcatacactattaaagaaaaacattactacaaatgaactacaaaataatgcaactttaaaataaagataatacatatatgtctaatgccttcacatatgaaggaatatattcatgtcatttctacattcttgatgagtaattcattatttctacattcttgatgagtaattcatttgtaaagcagatctataaagatacaaggtatgtaaatatcttagttgtttatgtgccttgctaaagtaataatattattagaagtacaaaaagaaatttgataggaaaaggaaaaggatgttgaaatatctgatgtgatagtttacgtttgtcaaacaatttttagctatcggtgtataattttacttgcatgactggatacttagttataattggattacactcaaaaatcaaaatgagttgacataatgtttggttgtgacacactaacagcaatagtgagtaagagagaagaaacaatgaatgtactgttttttttatttatttactaatttactattattattgaagtatgaggaaaaacggttgggtaaacatcaccatattagtataattaattgagggagtattgtatatctggttgaacaaaaagaatttaatgtacagaaagaatatattctaagccgtttcattatacttgatccaaaccccaccttggccccataccaaaaacaaatatggcaagtttcaccaactaaaaatatagcaagttttacaaattactcaactttcataaccaaaaacaaaaaaggcaagtttcaaaaattctctacaaagaaattctaggaaataccaaaataagatatttcatttcacccacatgtaaaatcaacgtgatcaaactcaaaaaccatagaatgaggaaatatgaaataaataaaagcgacccacaaaataacttatggtacaaaacacatatcatacagacatacaccacacatgcccgtttatgagattttggagcctaaaggcaaacttacatattaaggccctaattaggtccaagttttttgaatatttgatttttggtccagaccaaaaaaaatatttggtccgcatttttaaaaatttttatttttattccaaatcacgaataagtttctttttcggcttttacataatttttatagaaaaattaattttacaatatttttatgtatttttttatgtatattatatcaaaaaattcctattctagcaaaaccgcacatcagagccattgttaaccattggtcgttaaggcgtattcttaaaatccctatatctaccgctgtggcaatcggggcatgattttgtaactagcatttccttttgctctaaagtcaaaccaacctgtaaaagataaagataaaaaaaaaattagaagtagagaataatagtcaatattttcataaataagatagaaagaaaaaatcattacttttatcccgcgtacagcatcatcatattcatagtcattagcatgggaaaaaacttcatggataaagttaatgacacgagatcgatctttggtatacaaagccgtgcctttgtagttgtagatggcttgcaataaattgtcattcagcacctgataagagatttttagtgtgttgttaaggcactaagaaccgctttccaaacaatatttatagtcctaacaagcaattactaagagaatagtaagggcaagtcaagggtcgatccacgggaaacaggggattggttatagtctaacaagtctagaccgcctaattgaagaagtttttgggggtttgaaagagttttggtatcaattaagactaactaataacaagaacaagcaactaatacgagtttaaatatcaaataaaatacactagagttaaggctactagtatgaataagaacggatgatgattgttaatgcgattgcgaagcaacaaagacgattatgcaaggtttagtttccctctaaattacttgagtcctctctcgaatggtcctcaagagtaatcacttaatctatcaactaaatcctctctcgaatggtctttagttaattgattaagagattcaataagtttggaaaacccctaatgaaggatcctcttaatttccatccaatatcttggtatagaaattaagttgattcttggggatgataaaagagttcaaaatccgatttaagaacatttgaaatcaaaataccaaagtataaatgtgatcaatatctatcctaaggtctcaaaacaccaagatcaatgcataagcttctccatacatcacaatcacatcaacatcaaatttaaaaccctaattcatactttcaccctaaccctaaattatgaaactactcagtaatcatggagttaaagcaattaaacaatgaatctatgactaatctaaggctaaacatgattaagaaatgattaaactaatgaaaaccacaattgttaaactaagagaatgaagatcttaaataatataagaacataaacaaacaccaagagaatgaaataataaaaactgaaactttgaattgaattgaatgaaaagtaccttgaatgtaaatcgaatcacaaactatgatctctaatctcaattaccaatgaaaactcaagtgttttctctctaatacaaaaactaaaaagttgtgtgaaagatagaataaagcgtaagtccgtaactcctctcgaaaagagggtttaatgaacaattgttttttttccggatcgtgaggtgcgggcgcaccaaaagtaggtgcgggcgcaccttgctcaggtgcgggcgcaccaaacttcaggtgcgggcgcacctgagtcttctgcctctgggtggaattctcttcgtcaaatggtgcgggcgcacaagatgaaggtgcgggcgcaccagatgaaggtgcgggcgcaccaatgtagtctgttttgtgctccagaattggtcgatggtgcgggcgcacgatcgtgtgcggggcataccaagcgcacctcaggctacctttcagcctctagctcgatcccttatgccatgtctcgcatttctcgaccccgaagagggcaatacctgcaatagaaacacgaacaaacatggtgaaagcattacattggccgtccatgaagacttcaatggaatcttctagcatgtcagagaagattgctgtcatacacctctgaaaagtggatggggcattacacaaaccaaagggcatccttcgatatgcaaatgtcccatacgggcaagtaaaggtggttttctcttggtcatcccggatgaatggggatttgaaagaatccggaataaccatcaagaaaacagaagtgtgaatgacgagcaagcctctccaacatttggtcaatgaagggaagggggaagtgatctttccgggtggatttgttcaatttcctgtaatcaatacagactctccacccagtgacagtcctagttgaaattgtttctcctttctcattctcaactatagtcatgcctcctttttttggaaccacgtgaatcgggctcacccacttactatctgagatagcataaatgattcccgcgtcacgtagtttcaagatctcctttttcacaacctctttgaggttgggattgagccttctctcgatgctcgatggaggaggcattactatcgatgagatggatacgatgcatagcaagagaagggcttatccccttaaggtcatcaattgaatacccaatgacatctttatatttttgcaaaattccaatcggttttgatatagaaatgtcatcaagactcgaattgacaataacaggataagtacatgcatcatcaagaaaaacatatctaagagaggagggaaggggtttgaactctaccttgggaggaggcttagaacactcctctttatcagtggatgatgcagctagaacctcaaacgcctcatcttgcgtgtcctcttccatgtccaagttaagggtgtcggtaagtgcagcatacaaatcgcccccagaatcatccacactcatggtgtcctccacctcatcttccactaggcttacccggcaaattttctccatcataggtctcttcagttgttttagagaactcgaacaccacccgctcattagctacctcaaccgtgattgtgtcgtttttgcggtttatcacggcacccaaagtcttcgagcttctcttcccgaataagaggagtctcgggatcttcctccatatccatcaccacaaagtcgcatggtacaaacacatgcccaacttgaatcggtatatcctccaactcaccacaaggaactctcacaaggcggtccgccaattgaatcgttttgcgcgtaggatgaagaggaaatttcaggtgctttgcaatagaaaggggcatcaaattgacactggctcccagatcggccagtgcacccttaggttctaagtcacctatcttcaccggcaaggtgaaactcccgggatctctttgcttcttgggcatagttcgttgcacaagagcactcacttggtaaggtagggagataagttcatcttcaagttttcgcttattggagaggatctctttcaagaatttagcataagtcggcatttgagacatagcctcaaggaatggaatgttgatttgcgggctcttcatcacattcgaaatttagtgaacttgtcactcaactttctctctaccaacctatgaggatagggaacccggaggcacataggatttggttggtggaggtgatggcaatgtgtttttgtcaccaacttgaacatgtgactcatccttctcctcaacgtcctctttctcggtttcctcggctccagcctcctcaacaacctcggcttctccatcctgctctaactccccattcggcatcttaggacccgcataacttgttcccgacctcaaatgaatggctttggcttgatggaggttggggttaggaatgggttggcctggaagttgatttgtgggggtggagggattcttctcgcctacttgggcaatttaggtttcaagcattttgttgtgggcttgtagctcttgaaacctttgctcatggttttggagaatttggttcatggattggagttgttggagaatttggagagaggttggatcggaagatggtgtaggttcgggattttgtttggggaaaggaaggttagagggaggttttgggttgttggtcctttgatgtggagcttggtatgtgttggaccttgtgaggaggaaccaccttggttatagttttggttttggttatacccttgcgcaaacccttggttgtgagcttggttgtaccctttgccgaggttgattccatccttgttgaggttggttgaatccttgggtgtagttttgttgaggttgtctccaccctccttgttgattgttcctatacccttggtttccttgatatccatctcctcttgaattaattgccgccacatgctccgaatgggtacctccacaataagaagtatcatggttagtaccaccacaaatatcacaagaaaaagagtttacccgtgaaggagtagacgatgcaagattgatcttggagagcttcttatcgagttggtccatcttagcttgaatttgatccatggggtcaatttcaaactttccgctcttcttaggttgagcacctcttcgtcttccaccccatgagtagttcttgatcacctcctcaattgtagactcaagttgttcttgcgggatcttagatagttgacctcccgctccaaagatcaagattggcccgtgaaatcggatcaagaccatcatagaagaatcgcatgagtagattcttgttgaactcatggtgtgggcatgaacggatcatctccttgaaccgctcccaagcttcgcaagtgtctcatcgttctcttgctcaaatgaggagatcttcctccttatatccgcagatcttccactccgggaagtatttcttcaagaatgccatcgtgacttcttcccatgtagtgagggaattagcgtgcaaagctcttgagccatgactttgcttttcccagtagagaggaccgaacaggtgcatcttgatgtagtcgagagagacatcattagtggttatcatggcacgatctcaagaaatctgtcgagatggtcaagaggatcttcatccgaccccccacaaaatcgctctgctttcaccatccgagtataccgagggtgaatgctgaaatttgtagtggtggtagggagtcgaattccaccttgaagaacataggaacccgatttccgaaatccctaaacagttgtggattttcttcacccatttctgattcaacttcacttgatgtacttgagattggtgaagaaggctcggaccccaaagtcgatttcccaaattcttccgaagctttcgcaacgcatttggtcgatttcaagatctagaggcaatgtgggtgaaccgtgagttcttcttctcatgtaacacaacaaagctaagcagaggattagcaaataacaaccacaaataaaaagaaaataaaagaaaaatcaactaagcaaactaaactaaaatatacttcaatcaatagcacagtttccccagcaacggcgccattttgataagaggtttttagtgtgtcgttaaggcactaagaaccgcattccaaacaatacttatagtcctaacaagcaattactaagagaatagtaagggcaagtcaagggtcgatccacagggaaacagggattggttatagtctaacaagtctagaccgcctaattgaagaagtttttgggggtttgaaagagttttggtatcaattaagactaactaataacaagaacaagcaactaatacgagtttaaatatcaaataaaatacactagagttaaggctactagtatgaataagaacggatgatgattgttaatgcgattgcgaagcaacaaagacgattatgcaaggtttagtttccctctaaattacttgagtcctctctcgaatggtcctcaagagtaatcacttaatctatcaactaaatcctctctcgaatggtctttagttaattgattaagagattcaataagtttggaaaacccctaatgaaggatcctcttaatttccatccaatatcttggtatagaaattaagttgattcttggggatgataaaagagttcaaaatccgatttaagaacatttgaaatcaaaataccaaagtataaatgtgatcaatatctatcctaaggtctcaaaacaccaagatcaatgcataagcttctccatacatcacaatcacatcaacatcaaatttaaaaccctaattcatactttcaccctaaccctaaattatgaaactactcaagaatcatggagttaaagcaattaaacaatgaatctatgactaatctaaggctaaacatgattaagaaatgattaaactaatgaaaaccacaattgttaaactaagagaatgaagatcttaaataatataagaacataaacaaacaccaagagaatgaaataataaaaactcgaaactttgaattgaattgaatgaaaagtaccttgaatgtaaatcgaatcacaaactatgatctctaatctcaattaccaatgaaaactcaagtgttttctctctaatacaaaaaactaaaaagttgtgtgaaagatagaataaagcgtaagtccctaactcctctcgaaaagagggtttaatgaacaattgttttttttccggatcgtgaggtgcgggcgcaccaaaagtaggtgcgggcgcaccttgctcaaagtgcgggcgcaccaaacttcagtgcgggcgcacctgagtcttctgcctctgggtggaattctcttcgtcaaatggtgcgggcgcacaagatgaaggtgcgggcgcaccagatgaaggtgcgggcgcaccaaatgtaaggtgcgggcgcaccaatgtagtctgttttgtgctccagaattggtcgatggtgcgggcgcacgatcgtgtgcggggcataccaagcgcacctcaggctacctttcagcctctagctcgatcccttatgccatgtctcgcatttctcgaccccgaagagggcaatacctgcaatagaaacacgaacaaacatggtgaaagcatatgtgctagaaattcgatcgaaatagatcgaaaatctagcaaaatgtcactatgaccaagtatgatcacgtgaatgaaatagaagggaaaagtgaggagaaagaaggaagaaaaggaggaacagggagctaaaacaagccaaaagaaggtcataaagtgcgttagaaacgcacttatcagcaccctagtactcttgtcctcagctgtaaaattcgttggcaatagcttaccgaattcttgctcatcgattaatctttctttgatagcatctactagaaacttgatgaaagacacccgatgatttatcgaccaaataaacgggtgatcaatcaaccaagttggttgaagcttattgcctctgttaaccataaaaatataaaaattataatcatataatcatatacctattaatgaaaacaataaaatctttacaaataatatataaattgtgttgcagataacatgctttttaatagataaataaaaacaatttataatattagcaacaacattacaacatcatcatatgaaaattgaatttaataatgaaaaagaagaagatgaaaacatagttgcttatatttttttttttctgattcttaaactatgtagaaagtgacgtaggtcatcagacaatttgtaagaagactcgagttcttaaacccaagtttgcaaatttgatatttgtcttgggtttatcaaatagatgatacattccattgtagataacaattcatccatttttctttgaacttgggtgcaggtgacaaatatgaaatatcttgggttctccttcttcaatgacatataatgatgtttccaaatcactacaaatctcgtactgaatatgtggcaaacataccacatattacttctctacaacataacaagaatacaatattaaattccattaattaaacaaaactataatgaattgacaaataatatttttttacttaaatattgatcggaagacatctgcaatatgttcccaccacttttcacgggtttgaactgctttagtttggaaattttcaagcttcaattcaaattggcgtattaccaaatcatgctccgattgccacagcggtagatataaagattttaagaatacaccttaacgaccaatggttaacaatggctctgatgggcggttttgttagaataggcatttttttgatataatatccataaaaaaatacataaaaatattgtaaaattaatttttctataaaaattatttaaaagccgaaaaaggaacttatttgtgatttggactaaaaatcaaaattttaaaaaatgcggaccaaattagggccttaatatgtaagtttgcccttagggctccaaaatctcataaacgggcctggatttagcacctatcacaaatgagtcagcccggttacacaggtcaacgcttgagagtaggaggattaacggaatcgttactcacaagcacaaataggtagcgcgctcgaacttgtgaactcaaagttacaagataagttccccaccaactctactaagcaagcttggtcatagtaagtagtaacttaattactagtgactagctaaactactaaatgcaagagtataaatacaatagaagtaacttgttaaaatacaagtgtatgatattattactttttctgatgataactttgtaccgtattaaaagagattaacgccatgtttttttggacttaggctctgttctctcaagcttattttcagttcaattcagctattttatgtcgaagagaacaaacccttaagtttagttcagtcaaaataaatttagtttagtttagttagaataagtttaaaataaagaacagggtttaagaacatagaagacttggaacaaaaattattttcctaggtttatgtagagctgtacctcgctcactgaaatgatgaatcatacttaaagttctacaataattaaaagatgagttcgtattgtgtcggactcgtccgacacaatattctcgtcggacgacttcagttagacttacttgcgtttcaggtagaattacttgcatttcagttggtctttattttttttcaggtagtcttcatttttttttcaggtaatcttcatttttttccagttagtcttcatttttttttccagttggttcttgttcttcagttagacttacttgggtttcaattggtctttatttttcatcaggtagtcttcatttgttttcaggtagtcttcattttttttcagttagtcttcttttttgtcagttggtcttactttttcttcagttagtcttaagtttttttcagttagtcttaagtttttttcagtttgtcttactttttcagttagtcttcattttctttttccagttagtcttaacttaggtctaaatgaaagtaagtcaggtctaaatgaaagtaacttaggtctaaatgaaactaacctttacttgaaggtattacaacccatagcatatgttgccttctttgtaactttaattcacaatgtcatgactttcttccaagtctttaattcttgacatggttgaacaagcaaacaaacaagaaactctcacggcagtagtgcttcccaagtgtgcatacttcgctataatcaatgaagagtcgtcaaatccattgtctcgctcgcaggtcggaatttgtcgcatggctttagcttggattgattgttgctagttctctgtattattgggtagttttgttttctcatgacaatggccttgaatagcccagactcaatatgtatggctgccttggcttatggggaggtgacgccttagtgcgtttattaaaaaaccaaaaactatcaaaaaaaaaaaatctggctgaatttgtattgtcaattgcaaactcataatcagatatggaggtttgtggctgttgatgcttgttaatgaatcagataatgaatcacgacgtaaggagatgagagtactataggagagagaaacagaggaaagaactgaaaggctggagaaagaagacgatgtgaaagagaaaagaggagagatttttcatttgggtcagcccgtctgacagtaagtatttggtcagacggtctgacccaatactttcacttaaaagatattatatcgttgttgtgattgtgattaataaataaaacaaagacttgatgcaatgtaaaatatgtcatcatagttataattaccatgaatcagccaatctagtctgtaatactccctccgtcccataatatagtgcttgcatttctctttgggtgtcccaaaatgttgtgcctatttcttttttatcaatttatttggactaaattatccttcatttctacataaaacttttcaaaatacccctactttcttttaaaatatgtgcccctattaattgttttacaccattccaaggtatatttattgctctttcattttagtttaaaggaaaaagaagaaaaaactagttccaagacaaaaacacccaataaacatttacttaaatatatatttttgtgaaattctaaaactctttccatttttcttaattcttgtgaaaaatgagaagtgagcactatattatgagatgaaaggagtactaatcatagaaaaccgacaatgaatacattagcctcgtgtaaatgaaaccatttggttttctaacgaactggtgaatgacaggttcacaaaattttattttccaaaagacaactacgagtacaatatttttctgatgaaacttcctgacaaactctacattatcattactgtattaaacaatgagggggaagaagaggaaacatcattatgaaagcaaccctgcaatatttatattctacacaaacataagtgttgtttaaatatttttggttaaaataccgcctatttttaaattaaaatgaattattgtgtcgggtaataccttgtgctattgtgtataattcgtttataatttttttatgaaattaattgaattacaacatatcagcgtatacatatcagagtttacaaatattacaatgtaaaaaagttaatttgatattttactattattttaaatgaaaacttgataggtaaaataacttgtaacatgaaaatatattagtatattactcatttactatcattaatttgtattcaagtccaatattgagaagagaacgtctattttaataatttgtatattttcaaattttctttttgctatcattaaaagaaattgttcttgtagcaaagagcacatgaaaaaatggtaaagcaaattattctttttttatttatgggaaaagcaaatgatttatatattgaagatattagatatgataggtagtattagcttccctcgtctcgtcttctattaaaatcatcaagtcttgcttgtgcttagttacaaaacaaaaatgtcatattttggacaaaacgctatctctagtattttatggtgatcaagccaaaacaagccaacgaggtactaaacatcacaattattctctttgctgagataaatgccaaatttttatgggcccataattattgtgaaatttttttaacaggaaatcatcagtataacttgttaagtgagaaaacttctggttctctctctagttttctagagagagtttgttccctctaggtttttccttgggaggatttcttcctagcctccacggttagggttttcatttttttaaagctctctccttccttctttcttcctcttcttcttccttcatccttttcttaggggctacaaccggtgtcttaaccaaggtaagccctcaaaaatcctatttatttgctttcaataaaagttcccatctattagatggtgattttttctagtatgttgattgtgttggtttttgaagaattagggttttacaacttctgtaaaattatggaagactattggagtatgttcatcccaaaatttttcagatctgatcagatcgtatgccaaaccgtagcgaactcatagattgcattgcttcgatgaagaagatttttattaaggcaaaattaagtcaaatctgcgatgtttacatttctagggtgatatgtatttgtattagaattttatgtttttcataaatggcttgtaagtgttgtttggcgaaatattaatgaaatcccttttctttccgtaaaaaaaaaaaaaaaaaaaaaagaacttgttaagtgacctgcaaattaaagaagctaaaagtgtgtttaggaaagaaaagaataaaactatacaaagtgcaacccgacttaattaatgcagactatagcttagggactacttaagcaaaagattttcaatgcaaatctatcaaaaggtgtgcataaataacagtttaaattgcatagtatagggtttgatcccaagacctaaagtacatatactaaagttttaaccactagactaaattttatttagtgttattatcataaagtattatattaataaatgaaattttttcttacccagaacatagcccgggcctaataactagttaacatttaaaagtagccaaaagaacaagaacaaaaaaaattggttaatcatgcttttatttaggaaagggaaaaaactattacgaaccctttctaacataattccttaatctacgtgcaaattgcacacaaaaaaacgaattgttgtttattttaagctattttttgcctattttaggtgaactgcgaattatatagcaatttatgttacactgctctaatttaagtctcatccattcaactgttacttatttattctcaaatcaacaactaatctatacgaatatattaaaagacttgtgcgacaatgtatacacgccaagtgtcacctctattactcccttagaattgttcaatgtgtacataagtcatgtcaattaacaaaaataaaattagcttgcaaccagatttaaacccatgacctcttgctattatacataacacaattaccatctcaaccaatttttaattatgctttaagtttccatattattatatttgtactttttaaatgttgattttccttaatatatattagtaggaaaggaaaaaaaaaatcatatcaagtttgaataataataccaactcgggacaacacgcgagcccattatactagttatcatgttaaaccctgacataaatcattgtaaaactgaggtagtagtatcagatgaaccaaatttgagagaagaaatgttttgtatcctaattggcatctcaacttcgctcacaaaaaaaaatgtagctgattccttcaccaaaaatatgttcacttacaaccaattacattacatgctacatcgaagaatactactatattattattattttttgataatgaagaatactactatagtagtagtggatatacaagacttattcacacaagtcataaattaagattctctgatcttatattaatatatgcttcctaacagaatacacatatcaatatttcattatatcaagtacataaattggtttatcttccatatatttacagcatttctcccttacagatgtacagaaaggataatcattatcttgatgatctcaactactacaaataaaaaacatgattaagactgataaagacatctagacttagttgtttactttattacttattcagctgcgccaagtgtacggatctgacttgattcttggatcacgtaagacagttcattggttacaacgattgacttgaggaatagtggcaactaacactataagtttatatcaacattttaatgagatgatgcatcatttactactaactcttctgataaagaataatgtgatacagttcaaatgtcaactaaatgagatagcataactgcataagcaagaactcaatggaacttggacagctttgtttccccctaaagaatacagtatatattgaacgttgacaccaaaagaataacaaaaaagaaatcttagtaaatcaactctgtgtttttaccttataaaataagtttaacaaagagtaaatgttaaaatggttgttggctattgagtaactgttagcttgttgaatgttaattgtcaaagattaattgtctaaataacttctgaaagaatatgtgtaaaactggctattgagttagtaagtaaaacaagacatgagctattactccaaaagctgtctatattcagaaagctattttttttttactttaatcactaaaagctaccttgaaatattaatttgccaaataccaatttatatcttagtaatatttgtgacctgttccggtatgaaataagtggtagggtgtgaatcggtatgtccttcgtaggtaagtcggtttagtttcctgcaaaagagaacacgtaagctaaccccgggggttgatccgaggaacgcccctccgatgcctaagtcagtaatgggtaaaccggtagctctcaagtagagtatgattgtgtttgtgaacgtaccttatgactcagatcaacggggtatttataggagccggtaagagtcattgttcaagtagggctctgctcctattggttggacgtaggtatattcctttgggatatactttcatcttctattgatgtttatctttaggcccgtaggcgcatttagatatagaaactggatcaagcctaggcccatagataatggcccaaggagggataccgtcttggtatcttaatgaaaccggtatgacgaagtcaacggttctgtagtaagtgtattgaccatgacgatacatatcggtctaggtggaccggtgtggaacttagtcagcccccatacagaaccactaaacactaatttgctagataccaatttttaccttagtagtatttgttgacttagtcgaaccactaaaagctattcaaaaagttgttgtcgaacgtaccaaagaattgaatttagaaattttattttaaatcagctgaagtaggtaaattataggtaacaaaatgaagagtcacacttcatgagtataattaattcattaaagataatttctttgtaaaagtaaaattcttgagctaacttgatttgtattctctataaaaaatatagtctggtgcgtgtatttgtatactaaacataattagcagaacaaatagtaaagttttttcctctgtccctagaaaaattcatacagtacttctcattattggatgtcccaacaagtttcatatttctagattcaagtaaaaatttcctctttttatttattcccacactttctttatttcccccttgctctatctgatagtcttatcctctatatataggaacaaagggtaatagacctaatctgaatagaaaatcatgaaaatagaataattcacataaaaaactttggaattgttgttgtttagttgggagaggccatctgtgacttgcatgcccaagaataatgaggatgtgaaaaactcagtgatattacacatttcaatggttgtagtttggcaaaacgtaggaagttttactctccttaagattgcaattcaaataataattccctaaaaaatgtgatgtttggttgactaccagaactccagaagtaccacttctacttgttctacaagaagttccacttacctaggaaaaactaagctactttcttaagttgcactttttgtattatcaaacaacacagagttacatacaaattacttacaaactccgctatttttttatgtcaaacaaacaaccactcaaaaaagctactattgtagctagtgcattggaaactctgataatttccccccgctctctcctaaaacccaattacgattcattacaacccatatgattgggaataaaatttaagttcaagaccacaaaaaaaatctacttgcctaactaaaacgggtagaaactaggactgtcttgtatacccttaatagcgaaagggtagttagatcaagggcactagtcactactgacatagtgacatttaccttggttgtcttaagggttacgcaaatggccagacccacaacaaaaacgtagacgatataacaacagctattagctacaacatgttgcttataattgcatggtgtttctctcaagagtataatacaacaaaagaatataagtagcaacaccaaatatgtctctaatctatgatttcaatccaatagtagggttgttatactcacaagtcattagactaatggtcaacagatgaatcttcataatccaaaaatgtctgaataatttcttcttgtgttaaatcagtgaagtaaccctttccagcaaccataccttcttcccgtgcaaggcgctcaacttcaacctgaactttatctcctccaaccttgctcggatccagcaaattgcaagcgacctcaacggtcccatcaccatgagcaagcgccatagcttgcactgatggaagcccacctcctctttcaccaatgactttagcaattctacgaacagctgaaatgttagttgagaagattgggacgttgtagttgtcaacccatcttgtactccctattactataacgcccttagacggatcaacttgacttggcccttcatcggggcaaattggtaaattctctgaattcggccccccagcccatatatttccttgagtattgggcataaagtagccaagctctcttcttattgaatcaagagtccgtcctttctcatgtgctgctccatatagaaagacaggaactgcatattcaacatactaaaagcataagaaaggcacaagattctccagaaaacctttaaataaaaaaccaaacaagagtccacttgtttctcactttcttgtgaggtagcagcaactagatgtgcgttcaatctagtagctaaaaaagttgattctctttgcgattgtaggttcggcctgcatatgcgaacccatacctcgccacagaaggtggccttatgccaattaggtcaattattttcaggtagtgtcagcagcacataaaacagtaacacgagagtggtcataagaataattccaatgttactatccaccaaaccgtgaaggataatttatatcgaagagtagttagatacaagaagcttaagaatcatcacagctgtagcaaagagtctcgaaaaggaactttttcgctttagtccgtcttttaggaaaaactacaagaaacatgataaaaaaaatcatgctctagaaagatttgattagtttcagatgacagttgctttaaacaatagtgctcccttggcctttgccccctaacccatagcctctatgtataaatctgaaaaatcataattatccttttgcaatgcctcttggctcttgcaatgcgtacaactaacaaattatgaaaacaacttacgggaacatgggtttcagcatacaacttacaaggtatgaaaacaaattcaaacaacttatctgaaatgtatcttagaatccaatattccagggggacaaaaaaacataactgaacactcgtgaagcccaccatgtaaacactcaaagttgcttatttcatccacaagatcatcatgcaagcattaagactaatatgaaagcagcatcaacaacacccatgcaggatcatatttaggaagtagacaatcacagcaccagaaactcaaacaagtccattttctattcaagcaatgaagtgagttcccacacttttactcctaggtctaacgtgctatgtaaagtacacaaaccttcaagcttggtgccaatatctctggccaaggaccttgcaatatttgccgtttgctccgaagtagcattggccaatgggtgaaggcatatgtgatcaacaactccaagacgaggatggcttccactatgcacattaaagtcaattgctttgtaagcagattcaaccattgcaaatggagcatcttttagagggaaaaaacctgaaggcaacttgggaggtagcttagagacaagagtataaccaactctattataagtttcatcttcaaacttattgataagtttagcttcatggaaaagcttggcagctctttcgatagactcaagggcagctttgttgcggctttctgatatgtataacttgcaacaagcaagcgtcatttttagcattctatattttccactaatcttcccgatctacaggaaagataaatgccaatattagctttgcaactgccatatatagatcgcgctcacacaagctaataacgaccacaaactctgcatatctaatagctttatcagcaatcagcagatgtcatatcaggcaggctccatcttggatatagtgaaatacacattattacatcattaattatgttaaaattagggatctgctgtataattaaccctttacttggtacatcataatccaaaagccaaagaatactaaattaatatttttaatgacccaccagaggtttagtatcatatctatggtaagaacaatttaagcaaataagacatctatataaggaatcccttgagttactatagttgcaacgctcatcaaaactcatcccagcaaaagctataagattttcacctcataaaccaaagaacttaagtacttgaaaaggtttgaacttctcaaaacaaatactgatggagaatgtaaaatcatcagagacaatctccatacatcatagttcttctgtataaatctattgacttacagaatctaaacctttctctgtaggcatcaaaccacacaaattgtactgctccatgtgcttctaagtaagggttatttatagaaactttattttctttcaagctaagcactgttctacaattcaatacagatgtaaagttcctattgtttatataaaaaaagtccactgatcccaccttacttaaccctcaagatcacatagtctcagccccagcaatacgagagggtagccacaaccacaaggctatacttacaagaaagaaagaataattaaaagaaaacctatgcatcataatgcaacttcagtgacctactatgccttccttaagcctgaaacttaataatcatgagcatcagacattttagggtaccccttgtattccaatttaactcctaaagtagcagaaatagccttaaacttcaacctaagctcttttaaaatgtcatctttactctcatcttcatgatccatatatggatacttctcaagcaactcttgaatttgatgtatactcttttggatccgtgcagagaagaaactgggttcaattcgaaccactgaggtccaaacatcaatgagaccgcggtaaaacccaagctcttcaccagactcaaacccgtgttttaaacccacttcagagccctcttgcttgcccaagacaagcccatctttatagccatctttgtaaccttcgttaatgtggcattcttccaagtttatagaagaactgaaaatatcttcatcaatagtgttgttgttgctcgaaatttgggtctttggtggtccgatttgttgaggatcaagacaggtttcaaatatatccattggatttgagaggggaataataatgaaggatagacagggggtacctgtttgttctagaggtacaaggaaatgtaggtcgaagattgtgtagagagaagcagacgaacgtatttcttgaggaggaggatcagaataacaaaacctgtgcaacaaagagaatactataatcatcaagcaaggaaattgtgataatagtaaatgcaattacccatagttcatgatcctttgttatagacatgctgaaatttgtacaaaatattagctatggattccatatttccatgtatctatagctaattttagcatcataggtataaagattgtggattattatgcttcaaaaatatcagttacttttttgtgtattgctcatcttgcgtacacataacagatattgtgcaccgttcacaagtcatagtcttttgtgtttctagcaggtaagcatgttaaagttaccgttctatgtatttgagtgactctcttaaaaggggtaactcaaagcactagagcacagtggctttaacaatggaaggggcaacttcctcaaaagttaacctcgcgcaaaagttacaattataatgcaccaggcacacatgaaattctgtcttttgtgtaacaatactgaggctaaatctactaatagtatctttgatcacatcaaatctatgtcaataatcaatatgaaataactagctgtaaaagacctcctgcacactcgtggtgatatagatgaaaccgaaagataaaaattcatacatgtagtcagtggcggatccaaaatttcagcaggggagtggcgtaaatttattatactattacaacctcaaagtactttactaaaagaattacaattgttcacaacaagttctcattttttcgaaccgatttacaattttgcttcaacttttacctccaaaaacaaatctttagcaagatatgtaactaacctatcattcaacaactcatctcttgattttcaacttggttgaattgtaaacaaaaatggatttgaatcaacttaatttccatcacatgttccattttaggaaaaaaaaaaagcttgagacatataaattcctatctttttttctcttcatggttctaaaatacatttatacacatagtacaacaatttactaatcaattcaactgctactttcttactcctatgaacattgtcaatctctaatcgaacactaaaaaaaaaacttaacaactcacctcacacaatcacaattcactaagtcattaaccattcgcacaaaattaatacccttgttcaaaatctataaaataacgttgtaattattgaggtgggcaattaattttagccataatcatcacaaactaaaaacaaaattggactataaaagtagaaaacaatacaaaaattcagtctattaaaccagaaaatacctctatgagatcaaagaaagactaaccaagatattaaatagacacaacaatggtgcgataacagtcggaaaagcagtcggtgaacagagagacagaggagagagaacggtgaaccaagggtcagggttcaatcttcagattaatcttcttctttttttttcttttttttaaaataaaattatcctacttttctctctttatatatgttgagagatctgcggaaatgttggagttgagtattagtcgtagaggtgggcatgggccgggccggcacgcggggcgggtcgaccctcacgatttgggcccagccaggcccgagcccgttcgagctccgtcccagtccgttttttgctacatgggccgcgggcctgtcacggtcaagaaattttatttcctgcaggccgaacgttcctttcctttgttttttagcctaaaactgtcaaaaatacaaaaataaaacataaaacatgggtcaggcccgcaggaagcacgagctcagctcgtgggcttgggccgagccgtggacaaatttttaaaatttcaagcccgacccaccatttacccaagcccggcccatgcccacctttaattactcgtagaacctactgcacagcgtagttggatactctaaaattctaacataagtctacaagttaaaatttgaccaatgttgattattggataaaaattaatggctcatatgttctcttttcaatattttcctccctcctaatactaagaagccttgtagagttttattaaaacactagaggatccggactcaaccccaactcacttgccactcggacacaacaaccaaattagagtttgagtaaactttcactagttattagactcggattatgcctcgggtaagaaaaacattcatttattaatattgtactttaaaatgataacattaagtgaaagtattgggtcagaccgtctgacgtattgtttactgtcagacgggctgagcccaatacatcttctctcattgatacaacacctttccttccatcagtagtgcgctcgaagtttagcaaccctttgtccatcgtcctgcacaaaagatcgatggaagttacctagattttggccaaagtaaactgcaaaaagacccagaataaacagatacaaaatctgtaaaaaaaaacccaaaagatagaaaaaaatcaaagcaaaccaaccttataaaaactcaaatgaaagccaaaaataattcacactctccaggtcttggagtgatatgaaagaacgaaatatcgcgacaaacaccaacgtaaatcgacgagatacaaccacgaaattctgatgaatttgatttccggaagcaatgattgagatgaaagggaaatgatatcaaatgcggtgctacttctagaaggacctggatctaataaagaagaaaaaaaccagctaagaggaatgaagaagaaggagaaagtgagagaaagtagaggttagtgttttgttttgttggactttgttttgtttcagttggactttgttttctttcagttggactttgttttctttcagttggactttgtttcgtaatatgtataccaactgaaacaaataatggaccaattaaaagaaataatgggccaactgaaagaaataatggactaactgaaaaaaaattaagactaactggaaaaaaatgaagactacctgaaaaaaaatgaagactaactggaaaaaaattggaaccacctgaaagtcgtccgaccaaagattatggtcggacgagtccgacacaatacgttctctaacattaaatacaaattggtatagtagttaaaactttaatatatgaatttgaggttatgggatcaaaatccacactatgcaatttctaaaaaaaaattattgtacataaattaaaactccctaagtaaagcactatgtaacacaaatccttgtttaggaactcctttagtatttgcataaaaggagatgatgtgcaacaaaataattgttagacgaaataatggcatttaacacatgaaacaacaaacatcgaaaaattaaaagtcaataatttctaaaaagattaaagcttaataacctttaaaattgttcgttgacaaagttgaatttaaggaactttaattgtcactctccttgtttacttgttcaattggcaaaggtaatttgatcatagaaatccaaagaagtatgataattcgtccaacttttagatggataaccagtgagtgtctcggacgatgttttgggttgttgctttttgtaattttgtcaagtgagtaaaaatttacgtaatgacatgataaataattgcatgatttttgaaaaataaacccttaaaagtttgaggatgaaagcaaataagcaataacttaactttttacaagaaattgaagtaagagtttatgtctataataatctcttgttgttatcataaaaatgttagttttctaactatttgtgcaaatcttttaatgagatatatttataagaccttatgatatcttatttttgaagtactaaacaatggtgttatgttggattcatggttaaagttccacttttcatttcaaagatatatattttgccaacaagtgtttcggggtcaggatgactgttattttagtttaaaatgaataataggtctcgtattttaagtagctactagttattaggcccggtctatacctcgggtaagaaaaaatttcatttattaatataatattttatgataataacaataaatacaacttagtctagtggtaaagactttagtatatgtacttgaggtctcatgatcaaaccctacactacgcaatttctaaaaaaaattattatacatggaatacatgaactaaggtctcgtttggttgcacttgggaagttgatcttcccttgatttttcacttcctaggaagtaaacgaaattgtttggtagactatgagaagatggaatggaaagtggcacttacctagggagaactaggtaagcaacttccctcattgtgtgggaagtagaacttcctaggaagttccacttcctatgctctagttaaacaaacatctacttataatgttgactcttaaagtatgattaaaagttggttgagatggtaattgtgtcatgtataatagcaagtggtcataggttcaaatcttgttgtaagttaattttactttcgttaattaacatgacttatgtatacataacttctttttttttggaagagaccttattttcttggaaaaattgttttaaataagtcaatctttgcgtggtcttccaatttcaagtctaacttttgattattcctagtcaagttaggcttgtagggctattttcttctattgagttttaacctgtttgtgacctatttagcaggttacatatgccacgtgtcgccaaatgattgatttgctatatttttttgttttattttctcactactcccctcctcctgttatctttctcttccatcttccttacaccacccccacccctcccctacccctgcacccccaccagcagcgtccccccaccccactcctcccctcccctgcccctactgcctttccaccagcaacacccccacccccacccctccccccacctcgcccactagcacccttcctcctcctcacgcagccccccccccccccgcgcctcccctccctcactctcgccggcgcactcgtctctgtcctcctccctcactctcgctggcgcactcgtctccgtcctcctccctcactctcgccggaagcccgcagccctaattcttcagatcatccgactcctccgtttctttctgggaagaaacgagggtgggagagggggaggcgcgggattatattcgaaggggtaaggagggggaggcgcggtcggaggggtgggggaggggaagcgattttccggcgaggagggggaggcgcgagattcgaaggaggaagcggaggaggatcgattttccggcgggggaggtatgggattcgaagggtaagggaggggagcgattttccggcgggggagggggaggggaggcgcgggattcgaaggggggtacagggaggaggagcgattttccagcaggggaggaggtggcccgagattcgaaggggagggggtggttgggctgttgttgttgtgggtggggtggggatggtgttgttattgtgggttaatgggtggtttttagtttttgggtgggttaatgggtaggttttcagttttgggtgggttaatgggtgggttttcagttttgggtgggttaatgggtgggttatctgtttttgggtgggttaatgggtgggttaattggtaaacttttttatttacaaatttatcaggttaccggtcatttatcctaataaaagttaatggtgctccaaagttgacttgactaggaataatcaaaagttagacttgaaattggaagacaacgcaaaggtttacttaattaaaataacggttatttcaccaaatacccctgacaaatcaaaaaattcacaatataccctcaatgtttcaacaattcaccatatacccctgacatttcatttttgcgcaccaaataccctttttttaacgtccgttatttctccgttagctttatttacgattttgccattattaaccctaaaccctaattctaatctaaccctaaccctaatctaacccttacccttaccccaaaccctaaccctaacccagcctaacacccctccaccctaggcccaaccccccaccacacccccccctagccccaccacttccccctccaccgccgcatccctccctcctccccaccgtcggccccctcccggcaacatccctcccgtcgaagcctcccgtcaaacgcgcaccccccccccctcccgtccgggacgtgcaaccttcctcctcctccccctccccctccccgtcgagatcatgacccctcccctcacaaaacgcgcaaccttcctccccctcccctcccgttagatgcgcaaccctcctccccctccccttcgaatttcgattttttttttcggaaatgggggttgcgatggaaggggttgcgggtccgtcggaaatgcgaggcagagggagggggtttgtcgaaaatgggttgcagatctgaagggagaggggttgtgggttcgtcggaaatgcgagctagtggggaggggggttgcgagtctgacggggggggggttgcgggtccgacgggggagggggttgcgggttcgtcgtcaaatgcgaggcggggagggggggttgtgggtccgtcgaaatgcgagccggtgggggaggggtgttgcgggtccgacggggaggggttgcgggtccgacggggggggggttgcgggttcgtcggaaatgcgaggcggagaggggggttgtgggtccgtcggaaatgcggggcgagagggaggggttgcgaggcgggggggggttgcggggggggtgcgagtcgcgacgggggggttgcgggggccgcagaccgggtgggcggtgagggggtcgggtggtacgacaggttggggtggggctagggtggaggggaaggggtggggtggggtggtttaggggttagattatgattagggattagggtttagattagggttaggaattaggtttagaagttagggttaggagttaataatggcaaaatcgtaaataaagctaactgtgacttaactaacggttaaaaaaaagggtatttggtgcacaaaaatgaaaagtcaagggtatatggtgaattgttgaaacattgagggtatattgtgaattttttgatttgtcgggggtatttggtgaaaaaaccgttaaaataatttttcctattttctttattaacatgtgtatgttctccacttgtcctcctctttattctctctgttccatcatatagtgtttgtttcttttttacacgatctccaagacgaaactttgacttttaatatcttcaacctcgtattaactaaaaaatataaatggttgatttatgaaagtacacgttgagacaaatctaacaatatcacatatgagtaggatcttttgtatatataatgagaataattgatcaaaaattttaaaatttgactcaccaaagatgaaataggcaccatattattattataggacaaagtgcgtataagttaattttagatgtatttttatggttatgaacaatctacttacgaattgacaattctattttactcaatatttgaaaattttactttcattttatagattaactatctccgtgaattttgttttaatgtgtttagatcaatcttttttttttttttttttttgaatgggaacggggaaattatcattagtaaaatgacatacgacatctacaatcataataatccttacctaaaagataatctaaaatatcaatctgaaaagttgtcatccacgctactcatgtagacgcttcggaaccgctgtcgtgatagggtatcactccatccataatcgattttagatgactcaacatcgttaaagattgatgtagtagtaacctaataaaatctcaacttcatctcgatattcttgattttcagccggagagtatgatttctcaaatatgtaaaacgatgcttcaccagttccacaaatttgcaagccaaaacttccaaatctatatccctggatccataaacgataaataaacaaaaaaaaaaggattaattgacccactatgaaagaggtgactctaaatttcatgaagggaacaaaagccatcacacaaatgaaactttttgaaaccataaaaaaaaaaaaactttgttaaaataactttgttgtttgacttgtttctctcactagaaaaaagctttttcagttgaagtttttgaagacccgatcaactatcagttacatcattgtcctattcctaactatacacccaaaataaaaataaaaagtttaacccccattacaaattttatgtcacgtataccatttttgcatctggtattatgtttatttcaaattctgaatgcaaccatatgccaacaaattaaatcaatgatagataacgctagaaaccaaactatgcaaacagagtttggtaaagacattttttacaatgaaagttttgttttactttagatgtataaaaacataattaagatttttttttttataaaggtaagataaaaaatttatgaaagtttttctctgaagacatgtcgtacatgataagagtggaactttgagagtaatgattgtgcaaacataatttctgaatgtgcaaatatactttttcgatgtacaaatgaatttatggatatatgagatacaaaataaatactcgtctgcttgtgcaaacatagttttttgatgttcaaacattctttttggacgtacaaaaattatcgtggatgttaaactacaaaatatatattggatgtgcaaacataaaagtaaaaaaaaaaaggattatggatccgaaaaaatatttgttagatgtacaaacataatttggatgtataaagaaattttgaatgtacaaacataatatttggttgtaaaatgcgataacaaaatacaatctaaacgtctaaacatgattttaagatgtgcaaacataatttttatattgcaaaaatattattttagactttttttttttttgaatagtaaaattaattcattaataaaaagtcatacgacatctacataagcaatcgaatcaaacatatacataagttgaatcaaacaaaaatttccttcataaaaactaagatcgtcaaataaatcttgcaatgtggaacatctcccgcttatatcgctttggaaaatacaaccttgttggagagacaatctaacgatcccttgtagtcgtgaggatgatttccgtcggattcatctaaccgtattcgaaaaattgataacctttgtgatcccgcataattcttcaccaataaaataatttcacggcaatccattagatctagtatcccagattgtaacctgtagaaattccccctataaaagaggagaaaaaccctgtctttcgaaggaagtcgaaaaaccttgtctttcgaaggagatcgaaaaaccttttcttacgaaggagatcgaaaaccctgtcttttcgagggagaattggttattggaaacctaaaaacaaataaaaaagcaaaggtgggggctttccaacgataaaaaccgatggaagcccctttaaaaatcaacaatggaggctagggtttttgaaagtagagaggagagaggggagtagttgattctattagttggttgtgtaggaaataatcccttgattattatttagacttttcacttacccttttaacccttgtgacgccttctatatagtgcaatttgcaatttattagaatttaaagatgtagaagtatctaacttactatatggaatagatgtaatgaattcaatttttcaaatttcaatgatttaatcatcataaaatattataaacctaaattaggaaaaaaatattatataataacatactgggctggattcagactctagaaaaaatttcggactagacttagaaaaaattcgaatcgaatttgtactcaatttctcgattccaaaaaactttagacagaatttgaatttggcaaaattcaatctaatccgatctatttacacccttacggccttaccaccaacaccaactagcacaataaagaaaaattgcaaagagacatggaaccacaaacagacaatacaacagacatttctaaattcgaatactttagtttaggcctcaatctaaggcaaagtgtgcgtggttagaaagtacaacaaacaaaacaagttgtctaaactctaaagtagacgtagtgaccctcacgatgtttcatgtttcctccttacttcttatttcttaatgcacctcacgatctctcttttctctttcttgtttccctcgctcgtttcggatcaccacaagtaaccttttctccatcactttttttctatctctctctctttctaatcagttaatcaacaacaacccacaacaacaacaacaacaacaacaacaacaatacacagctaagaaaccaaatacaactcttcacttctctcttttgactttccttcatcctacatttctatcttcttcaattttctttcagacattgtttttgtttttctagaatttaacccttttttcttagggtgcagttgaattcagtactcaatttgagtactttttatcatctgggtttttctctttgattaattgtgacaattgggttagttttttgtgtgtgtgtgtgtgtggttaaaagatggggtttgatgaacacaaggaagttggagagaaaagtggagcaaaaaaagagatgataaacacagataatgaagagttagataaacttggaagacaaatgagtgataattctctttatacaactgaccatgaagaagaagattatgagggtaaaattgaattgggtcctcaatttaccattaaagagcagttagaaaaagacaaggtcttttttgttttttcctttatttacttccatttttagaagtaacatttttgttatgatttgaaatattcataattggtatgttgtcaatttgggaattcaggatgatgagagtttgaggaagtggaaggaacaacttcttggtagtgttgatttaactgaaattggaggtaatttatcttgttcagtttttctctgttttttttattcatattgtggtgttttgaattggaattttgtaaattttgccttgaataatgatactttaattatatcttatactggaacttttggtccaaatgtatgttccatgatgcctgtcctacaattttttgatgatttcctttatcttttatgagcttggtaaatgcaatcaatttcctcctgatctatgagtaacataataatggttgaagatataacaaaatcgttgcggcaagcttaacaatgattgaatcaattggaagggtgggggtggggaactgggtaaatgtgggaatcttgagattttttctggcctaggtgaatttgaagagttcatttttagctgggggtttcttattgttaatcaagttagtgaaggattacatcagttgattgggaatcgaattagttttgttattgtagatacaatagctgcttgccatacgaagcaatctctaagctttgattatttcaagcaacatcgagcctaaggaaagggaatcattgagttattgctacacttcagtttctagatgatctggtgcttatatgttgatggaagttctgttactcgaactctttgaaacttttggacttcttttgggtttctccatgtcatttagacgtttatgtgtttctcctgtgaatattttgagataataccaatgtacctgtatatatttaaggtgtttggtttgtttctaacacgaccagacgggtgttggaaggataattgaagagtcggagtaccaaaatggcaaaagcacacaccttgctagtgtaatctttactgctggtaattaacttaacgttgagaatttggtaccatggtgtgtgcttgaactttttgggtgaccgtgattggaaaaggacaagaggtatatagatgagcaactttactttactttccttgtaatgctgaattatcccttagtgatgattctttgagttcaagggtcctataatgaagttatggtattaggcccagctcttttaagctactgctccaatggattacatgacatgtggcatctaacttatccccgagttatgattgattcttttccggaaggttcagtccaacatgatgattagttcctcaactattagttttaaagtaactggatctccatgccacacaatagcatcttcatcattgctagctaagtgtatgaggaaactttaagcattatgttgttttcctagcaaaaaaagtggaagattcattattatagaagtttctttgtttactttagcacaaattattctgtttttactgcatcgaaacttttgaatgccttgcacttgtgtaacaaatctgtttaagtttattgcagaagctttggaaccggaagtgaagatcctaagcctttcaattctctcaccagacagacccgacatctttcttccgattccagaggatggaaaaccaaaatcaccatggtttactttgaaggaaggtagccgttacaaattgagatttacattccaggttaaccacaacatcgtactagggctcaagtacgctaacaatgtgtggaaaactggcatgaaaggtgtgctttttctttttaacagtatctcttcatctcgtttaaattattgaagatcaaagatggtggaaaagctggcttttaactgagcttatttacagtggatagcacaaaagagatgttgggaacttttagtcctcaaccagagtcatacacgcatgaaatgccagaggagactaccccttctggttactttgctcgtggatcatactctgcaagaacaaaggtcagtctcatccagtgtatgatttgttgcttgctattgtgtgcagattttcgagatgtccccggttttagttgtttggctcatatttcttacaactgttcatattataagtctttatgttatggaggggaaaggtaaaatcctagtgagtcattacatccgtcaagtttacacttgttcctttagagaacgatcaagaatcaattaccaatatcatctatctatactatgaatttaaatgctgtattctttcacaagattttgtcacatggcattcgccatttgacaatgacatggcagctggcaagccttacaatgagacttatttggcacaagttcaggttgttttctctcaatagtagtttatcccttactcacatccttttgtttcatatgatacacttcaaccatcaaatcagtaaactaaagtgatagatcgagaaaaaaatatatgctaataagcagagtgtaaagatggtgaaggtctgaagtattaaagtcacactttatatatgctacttgacaatcaatttaatactccaatatttttcatatattcgtcattgtcataatgatcgccacaactatgatattggggatttttagcaattggctatttgctattggccgttagttgttggttgttttactttgcgggtttgaccaactgtttgtattggctggttatgttgggtgtttgacttgactatatataaaagagtataatatgtctttggtgctggctatataacactaaatgaatgtaaaatccaaaaggcaacataaaaagctagtaacagcggctttttagctactcaaaaaccatgccaaacgttttttttgactgtttaaccaaatgaacaagctaaaagttaatgaaaaggctacccaatcttcatttaccaaaacccctactaactagccgccacaattacatgtctaattgtccgccgccaacttccaaccccattattatgctctatcaaccatgacaacgtattaaaaataactatgataaatttaaagttacattgaaaagttatgtgcatctccatttggggaaagactagttagctttggtgtcactactttagttaaaatggttttactatcggtagtttatctatttgttctatctttttgagagaggacaattttgaaaatcatgtaagcttttgaaacatcggtggtcatatttcaatttggaatcatctttttttactttaatgatctgtcattactcattactgttagaagggtaccctcttgccttctttctctaattatctattattactcaatagtgaaaatagcaattcaaataaagttaattcctcccatctcaacttattagctcttagtaaaatggttttcagatcactcctagctttcaactggatcactttctcttcccgtcctctttccactatgcttattccctgccactgctttcagaatttcaaaattattacggtttttagctcggccacctttcattctctggaccacgttgatgatcaccacagtcatgtgaaagatataaattcattcatcttcattaattattttgatgtcccagtctgcggtaccgaactcccaattttgtttcgcagtatctttttttcccttgtactgaatttaattagtccatgcactatggacttgacaagaatagttcttgatgtgcgctctcttaagtgtttattgttcttccttttcttttctttttttgattgggaaattaagtcagcccaagggctaacccctaccaaggctactagccttgtaggaactaccagcacattggctggtaaagcatgcaaagcatgctaaggaaataccccaacataatgctgggggtaaggatcaaacccctgacctcaaggatcagaggagagtgctctaccacttgagctaactcctcatccttgtttattgttcttcctaaattcttcatgcactatcgacttttttttttttttggtaaaatatagtaaccaaagtagttaattaagcgttcttacattccgcaaggtataccatcatacaatgactaggaggataggggaaaatcctagttacatttgcactatccttactaatacgacacttctttgctagtccatctgcgattctgttatgcactatcgactttaaccatgtttatccaatttttatataaatttcttttgaacttgtgaaattttttaatagattcgtttcaatatatgctctcaaaacatctgtggcttacaattaagaaactaacacattggagaccatgaaaataaagtatgaagaacaagaactagatggagtggattgtagccgggtttagaaacatgttgcattcaagaaaagtcacagcacatccgaataagtgacatgaattgtatcttctcttcttattttgcagtttctcgatgatgacaacaaatgctacttggagatcaattacacattcgacattcgtaaagattggcttagtacatgattggaggagttaggcgtgatcatatctctatgaccaaattatatctaactcctggcccccaatttattctctcgagatgaacataggttctcaaagttgttatggtcactcaatttgtttccttttcttttcctttttctcaagcatattatttggaaaagaaaaagaaagaaagaaactcagatatcttcttgtgtaatagaagtagctaactttgctcagtttgctgtttttgcactatcttgattcttggacactcaaaagcattatcagtctaatggaaaatgtgttagtttcttacatttttttgaaaaaaacttttctgctttctttatatcataagcaagtttagctcatcattaattatttggtatgggtgatttaaggtttaccatatgttgaaaaaaagaatgcccaaggcgcaatgactttgacaccctttacttgctttgcgaggtcaatgaagctaaaaatttgtatatttgacataatcatattattagttgatcatgtcaaatgagtaactgaccatgtaatatgtatacttcctcctccgttactaaataaatgttatatttactttttcacgtaactcagtgtgtatttcagattattaatatctttaatctttaattgccataatttaaaattataaaaagttgatattttaaaagtttacattgaaacaaatccaacaaaattcctcttgactatgttttttcttcatataatagcgcgaaaacggggtaaagttaattgatgcataatgttagtgtactcaacgtaacacttatttaggaacagatgaagtatttaatttctctgctttctttagatgcaaaatttgcctttttgacaagtaaattaacataatcaaatgttgtttatgaataacaaagatagtatatagaatttctaataacgtatataaaaaagcattttcaaagactatatgatgaggtaattgttgttacatacttacatttgtaggattagctatatataatttttaggggtcagtataaagtttaaatgggttattgataattccacaaatatttgaacgtatgatatactacacaagagaagagataggtagattgtttcagtctgattgatcatcatcataaattgttaggataaagagatttaggagtatatcctaacataattacagtaggtaattgtgtaggaatatataagtactataaagcgaaatttcatgaatcaaattcataagcacttaaatcaggatcatatgcatatacaattaaggatcacatacaagtttagaaataacctttgtagcgtgatttccacaaagcttgaagaacccggattgagaatctcgagatgtgattcctctacttagtccaaagaacccgggatcaacactccaccaatgctagttggaaaggaagaaaacttcttcttcggtttcttggagtataacgtgatttttgaagagagagaataggagagagaaaataataagagaattaactgatctgttttttttttcgcctaacccaaatatataaaagtatttaggtcgatttctctccccttttcctatctcttggtcggccaccctagggccctcttgggctctaggtttcttttgttgatccaagtttaatgtgtgaccttgtaggatccgttacattgggcttcgggtttatttatttactaatccgaagttctatagctttctctagcaagacgtatagacgacccaatataacgaacttattatctctataatacgatccattatatattagtaattgcatttaagtcgaggacataaatccttcaatctcccacttgtccgagacgagtgtgcaatgtttttattcctcaagtctcttaatgtcttaatttgatagtatgatcatatttctatatcatccatactagctttcaaattattccttgaaatccgagttcaaattgtcaaacaaatgatcatcaaatgatccatttgagcacggccatgcattttaaatttttactcttcaaggggccaagacacctatcctatctcatataggaggacttttccaatcttgtagtaaccaatactcccactcaacttttagcacaacctgaatgctgcctttatagtccccttttacggcatgacgtttgacagtatcaaagttgtactaatcattgggctaagtaatgttctactcatgtttcaggaatctactaatataatttcgaagttataaaacttctaagcaggtcaagttcgactatgtatcaactatacacgtccatatgattgattaaacatctctatgtttccatagcccatgaaacggcgctatcaatcaatcttatatgctaatccctttaataagtcatttatgtccagtttaatgacttagattaggaactttaatattctatgaattctgttcacttatggtgtttcattcatcaaatcacatatttgacaaaaccatagaattcaagatatattttggacattttatttaataccaaaccaaaattaaataagacaaaatttattatcataaacataaatagcaaaaccatgtctttacattgtaataagtttctctaaacctagtacaatctaaaaccactctaacatttgcttcaagcctatagccctagcgtgacactcatgcttgggttgaggtagcggtttagttagcggatcgaccacgttctcatccgtatgaactttgcggattcgacatccttcctgtcaactatctctcgaatgaggtgatacttcctcatcacatgcttggacttgttatgtgaccttggctcttttgcttgcgcaatagcaccattgttgtcacaaaacaactcaattccttccagaacactaggtacgatatccagctctgtcaagaatttctttatctaaatcgcttccttagtctgcttcaactcttgctaaatattctgattctgtcagtagttctgctacagtgctttgctttgagctcttccagctcacttgctcctccattcagacgaaagacataccctcgaccgagagcggtagtcatctctcgtcggtttggaagcttgcatccgtgtaaccttcaacaaccaactcactttgtcccccatatactaagaacatgtctttagtcctccttaagtacttaaggatgctcttagctgcagtccagtgtgcttctcccggatttgcttggaacctcgctacacatgctcaaggcatatgcaacatcagtcgagtacttatcatggcatacataatagaccctatagccgaagcataaggaatgctagtcattcactttaactcaccaggctcggtcgggcactcgactcttgctaagcgatatgccatgtgacatgggaacgaaacctctcttcgagttttccatgttgaaccttgtaagaaccttatcaatataagtttcttgactcagcccaatcatccttcgagacctatctctatggattttaattcccattatgtactcgacttctccaaggtccttcatacgaaacaactttttaaccattccttgaccgactcaagcattggtatgtcgtttcccatgattagtatgtcatctacatacggaaccaagaagactaagtcaagctcccactaaacttcttgtaaacacaagactcttcttcgcttttgatgaaaccaaatcgtttgattgcctcatcaaaccgaagattccagctccgagatgcctgcttcaaccgtaaatggatctctcaagcttgcaaaccattttaggattttctgggatcttcaaaaccttcatgttgtgtcatgtacacatcctcattcaagaacccattcaagaatgcggttttgacatccatctcgccaaatttcgtaatcgaaaaatgcaaagaatcgctaaaagtatccgaattgatttaagcattgctactggagaaaaggtctcatcatagtctataccatgaacttgtctcaatccttttgcaaccagtcttgctttgtagacatagacatttccatctttgtctgttttcaatttgaacacccacttgcatccaatagggttaaccccaaaaagcaagtcaactagtgtccaaactttattctcgagacatggagtctaactcggatttcatggcctcaagccatttctcgagtctgggctcgtcaaagcttgtttgtaggtaataggttctcaattttccaaaatcataatttcagaattttcagtcattaggaaatcaaccaaccttttgtttggaatccttggtctacttgacctacgcgggtccgagcatcaagagaaacgttctcttcaacagtttgaagattttcgcttgattcaacttcaaatggggcggtaggaggttcacgcgttgaatacgttatctcctcaacatgactttcgtcttgttgggccgtctccgacatggtgtgagacacgccaagttgttgctcatctcgaatttcttcgagtgttattttactcccacttgtctttctagaaacaaattcattttcaagaaagacaccatcacgagcaacaaacactttgttctcttgacggttatacaagtaataaccccttgtctcttttggatatcccacaaagagacatttatctcgacttgggtgcgagtttgtccgatagtaaccgctttacatagacctcgcatcccagttttaagaaaagacaagtttggaggttttccattccataactcatatggagtcttttctacagcctttgacgggctcctatttagtgtgtgtgcagcagtttcgagagcgtatccccaaaaagaaatcggtagatcaaagaagactcatcatagatcgaaccatatctagtaatgttcgattcctcctttcagatacaccatttaaccgtggtgttcctcggtggagtcaattgtgaaagaattccacaatcttttagatgatcatcaaactcgggctcaaatattcaccaccacgatcgatcgtagtgcttttattgtcttaccaagttgattctcgtacttcattttggaactctttgaatctatcaaaagattccgacttatgtttcatcaagtagatatagccatatatactcaaatcatcgatgaaggtgatgaagtagttaaaccctccccttgcctttgtgctcataggtccacatacatctcagatgtatgagtcctaaaagatcgctggccctttcaccttttccaagtaaatggtgattttgtcatcatacccattaagcatgattcacatacatcaaatgattcaaaatcaaatgatggaattataccgtccttttgtaacttgtgaatgcgcttttggtttatatgacccattcggcaatgccaaatataggttaggttagaatcatttgatttctttttcttgctatctatgttatagacttgtaatgatttatcaagcacatataaaccatttatcaaattagctcggcatagaacatattattgtaagaaatggaataacatttgttctttatttcaaagcaaaaaccttgagaatccaaaactgaaaccgaaattatgttcttagttattgtaggaacgaaataacaattatttaattctaaaataagcccggatggcggtgtagactatagctcccgacggcaagtgcaagcaactcgtgctccatttccaacgcggtagctctacctcgccttttgccaacttcctacttctttttagtcccacacatcattaactatgtgagaaccacaaccggtatcaaatacccataaagaagtagaagtcaaattgatttctataacatatatacccgaagtggaagccccagacttctttatttcctccaagtatatcgggcgcttcctcttccagtgtccaatcttgtgacagtggaagcacttgctttccgcagcgacctttggcttagcggttggcttcggtttttcagcgacagtggcaacttgcttgcctttgtccttctttcctgcacatttctttttgaaaccctttcccttttgaaccaacggaacctctttctttggttcaaccttagggatgttcctttcaagcattgaccaacaatccatgcggctcttgcaaagtcttttaagactcattcatattgtaggtcattctcgactcgattaaaactttcggtagtgagtggagaatgatgtcgtagcttgactcgagcctataagggaacccaagtctttccatgttttcggaaagacccatcatttcgaacacatgggggccaacaacttgacccggcttcaagtgacattcaaggatctccctgttagtctcataccgctcaactcgggcctgagttttaaacatggcccgcagctcttgcatgatcgtgtaggcatccttggtttcgaacctcttttggaggttcggctccatggccgctaccatcaaacaagtgattggtatagacttatcactagctttgttttgcacgacgtttttcagcgtcggttgattcatcgattattacgagaagcggggtatctaagacgtcctctcgaccctcaaacctcgaacgagtcttaaggtcctttcccaattaaggaaattttcaccattcggtctgtccttttcgagaaaaggacgaatgttgaaaccagagttgttgttgttgttattagacatgatatctacgagacgagaaaaataaggcaaagttcaattttatgtttataaagcaacctaaaacatgtaaaaggtttctaggttgaccacctattcaaaattaaagtcccctatgaataagtgttttacaagatcctatcaacatgtaacactaagcgatcggaggccttatcttaacgttacattatcaaggtaagtaaactcttttactaattataacactttataactcttgtttagatggataaacatcgcatgtttaactatctcttgcttcaaaattcaaaacgcttttgataattttgttaaggacaaccaaactaagttgtaaaattcgcaattttaccttatatgccaaaattaatgataacacctgaggaggcatgacctattactattaattaagggttttataagtactttatgtttggaaaagcaaaccttaatatttacggggcctaagtttattatgttgttatgaattagtgaactctagcgcatcaataaacaacatacaataaacttataagcattttaaaataataaaatgcgaaaataaaatgatctagtatggcccctaatcttaagaactaagcatcaacggctccttcttggactcttcatggatctccatccacttttccataagccttctcttgatgggctcttctttgtattacacaagtatcaaaaataatttaaataataactaaattaaataaattacaaaaatactcaacgatacgcatatcatatttaaaattacaagaatacatcacgatacgcatatcgtattttctatctttattttgggccatactagtcatacatagcaaatatatcataatataaaagccacataataatatcatatattatacttgtcaatcaattaaaatatcaaatattcttaattaaagcaagaagataaaattttaagtaatatctaatcacctaaagattctatcccttaaaactagcctaattaattttaattagattaaaaaatcagattatggattgaaatttatgaccaagtcaataattaacataattgaaatttatctttctcaatattctgattttcaaaataaaacttccaaaataaaacaaaacaaaaaaaaaactgctgctgcccagtttttaggcacgtttcttaaaaggattttttttttttgtttttttttttgttttttttttttggaaaacgtgaagaccaacagcaagctgccagccttcacgcaacccagaaaacggccaccttttcaggtgatctcgccggcaactcgccggtttcattacccgtgagccgacaccggcagcaaagccaccagcgccagcccacaacgccgaatcacagccccacgatacacgcgtggttgctgtcaaagtttcagtcgccgacgtcgactgcgcgccgacgtcgactgctcgccggcagtttgcgacccctcccccggcttcttgtcggccgaccaccggagtagccacgatggctgctcctcttcctccttcaatttttttttttttttaattgaagaaaattaaatttacaacctattgtaaaattaatttagtgattgtgtttaaattaaacataactctttatgtttaatacagaaaattaaatttaaaatctctattttaattaattttcagatttattcatataattaatcactaattcatgtaaaacaccttttacatgaatttatcttcatacataaacgattttaagcatgaaaattttattaataacatgaatttattttcgaaatttaaagatctaaaatcagaattttataaatttcgaaaattagggtttaggggtgaaaaaatttcggcttatattgagaaagcaagtaattaaaactccttttaacaaattacaattaattattcaatccataatttaattcatccccttaatcaaattaaaattaatcatacataaactaaactttatgaccaaaattctatatgcaagaggctaaaactgataccactgtaggaatatataagtactataaagcggaatttcatgaatcaaattcataagcacttaaatcaggatcatatgcatatacaattaaggatcacatacaagtttagaaataacctttgtagcgtgatttccacaaagcttgaaaaacccggattgagaatctcgagatgtgattcctctacttagtccaccaacccggatcaacactccaccaatgctagttggaaaggaagaaaatttcttctttggtttcttggagtataacgtgacttttgaagagagagaataggagagagaaaataataagagaattaactgactgttttgttttctgcctaacccaaatatataaaagtatttaggtcatatttctctccccttttcctatctcttggtcggccaccctagggccctcttgggctctaggtttcttttgttgatccaagtttaatgtgtgaccttgtaggatccgttacattgggcttcgggtttatttatttactaatccgaagttctatagctttctctagcaagacgtatagacgacccaatataacgaacttattatctctataatacgatccattatatattagtaattgcatttaagtcgatgacataaatccttcaaattggggtcattgataagcatgattacgggttaaaaatggctagtgttaatacactgatagggtaactaatatagtttttactagattgtatttaatatactaagggcctgtttggttcagctttgaagagtctcaagaaactgaataagaaatagactccattatcagatgtttggtacaattttctctgtttccattcctttaccttcctcaatcctactcccccaatttgatacccttctgacccttgcgataacaaataccgttaaagagaggaaacataaattcacctttacaactccactatgggtcacccagtcatctaatcagcacaagaatttgaagaagaaaaacggaactggaaaaaatgaaccttgtgggtctgaagaagatgaagccaattgatgagagaaaggaaaaaaaaaaatacagtagtgtgagaggcagtggcgtatcttgaaacttttgttactagggggccaaaaaaattcacattaacatatatgaaattctaaaaactataatacacaaacattatttctaggtccaaagtaaacaaataaatatatattgtataaaatatcgaaataaactaagttataaattaatgtttataacctgataaataataattgttggtacatagacgaaataaagaagtcaaaagtcaaggtttaaggttttagatagtatagttaaagtaaatcatgtgtaagaaaaattaaataaagatttttttttttattaggaaattaagtcagcccaaaggctaacccctacaaggctactagcctgtaggaaacaccaactcattggctgataaggcatgcataacatgctaagaaataccccagcataatgttggggataaggatcgaaccttgacttcaggagccaagggggagcgctttacccacttgagctaacttctattcttaaaaattaaataaagataaaacaatgataacaattattaaatgaaagaaaaagaaaaactagctaaaaaaaaaggaaaataaagaaatggcctaattacagttcacgtgatttcagaggaggagaaaaacatcaacatcattgtggtccctccggttccccaaattttcttctttaaacgatgaatattggactacatcagactcaatcatacattttcatatttgggctagatagaatgctgaagctctatctttttctcaaaatcttttaagggctagatccagtcctgtccctttaaagatccacccctggtgagaggagagcgtgtgtgcgatggaatgttaagaaagaattgggggtttgtgggccttgttaagtaaatggtaagccaaacaaaattagcaaaagaatggattgggttaaaattcattccattccgtttgttttttgagagcccaaccaaacgggccctgataatgatccgctgacatctatatatatataaaacaaggttcaattggcttatgtgtcattcactaaaagaatccgtccacatgtcatttgcaaaaaaccccctcactaccttctgccatgtgtaattcgactaatggaatgcatcaattacaatctttgtaactttagtaagtttgtatatttatgtagattaatttctaactgttttcctatttaatatatattagcgatttttttggcatttttctctccactctccacatcaaacaaaaaagttcatcatatcatacacagaagtagatacatattgtcaaccaccttatttttaattctcgctaaaaaaaaaatacttttaaaaaaagttgttaaaaatcgaagcttaaatcatcaactcaaaaattcaatgaccacctacttattaggatttagtggggttaaagcaaagagaattggtacagcttttaattaaacaaaaacattaagtgcatattcaccgatttgaagtataaacaaaaaacgatgaagtgtgatatatataatatatatatatatatatatatatatatatatatatatatatatatatatatatatatatatatatatatatatatatatatatatatatatatatatatatatatatatatatatatatatatatatatatatatatatatatatatatataaaactaccacgttagaaagttgacaatttatgattccactctcacagtctcacttagatttgactggattaagaggaaacaagcgacattgatagagttttttcaaaataggagtttggtttatataattgaaattaaatggaatgacaaaatcaaccatactattgtacaacaaccatactattgtacaatggcggactacggatgacgaagattgaaaaaattgtgtaaaaatgaattaccttatgtaattattatacaacaaccatattattataaataattgtagctcaagaagatttgatataccattgtcaattaccatcacaaacaaaatagtaattttgaagtataggagccttttaatggatatatctaatagtaagataatcaaagatcaaagaataacaaagaatatagaaaaggggaaaataattttactttacaaataatcttcaaaaatataattaagaaaaaaaaatcaaatgggtaatttcagaagttaaaagaggtaacttttaagcaaagtgtaacttttaattttaaatgggtcacttctagattaataaaattgacgtatttaaggcgaaaagttaaccccgtcccacattaatttattgtatatttgtatatctcgtgttactaaagaatttgtataaataaaatagtcatcaatatttttcaatatatctaatcaacaaaaaatctcccgtgtattttatcatgacattagctacatcaatcattaaacgcacgggtcataagtcggttttaaaatatatttatttattacacgatatgattataaaaactttaaatcacgagctaatatttaaaccatgattttaggagaaacatcctaaaatcctaaatttacaaaacaaaatattcccgcgcactttaatgtgtattttgtttcatctatgtatttatatacgtatatattatgattacaagatttttaaagtttaaaaatgttgtaacaaaggatttttatacatcatgaaatataatttccatcttaaaggcacgaattcgatctaataataattattgattcaataaatttgaaataaaaacaactacttaattaataaaagaattctcatgcattatgcgcgagtccaaatcatatctatatatatcctcccgtgcattgttgcaagtgggtttactggggccggtcgtaatgcgtgggtgcagccataaatactcaattaatttttatccaagaaaatacacttgctaacgaaataacatatatacattagttatattgatgacaccatgcaccattggcataatatccatagacttttcacaccgagatccctttttgcaattttaatttatagtttaacattaacttaatatatcaaaatcgaacataggtactacaacttataaaattcacgagaacaagttcattggaacataataacaaaaacctataacttctacgttgctgatgttgctctattcatttatttaatataaattatgaagtttttgtttctttaagcaaactacatgttttacaataatgaaagtcactgagttgatgctcgaattcttaatctcacttttgtaaggagtagtcaatgtgagctataaataatgaaatatattgtttatgcatgtaataagtcaaacttatttttttaataaattgaattgaaaaatgtcttttcactttaatttttgttaatttatatttagtacataggataaattacaatgtcatgatttttaggtcatcaatatcttactaaatatttaattatttacacaagatttcaaggaacatattgtaaaataatgaaaaaactaaaatttgaggtaaaatattaatcaacttttcgatccgattgaacacaagtaaccatcacaacatatatgtaaatgatataaatgatatctaatctcaaatatcaaacaagctgaaatataattgataaaaattaagtatttttttaggtgcaaaaaatcgaaatatcatttgtcataaaatagatcaacaaatttaaggttgtaatttttggcaatttcggtacgaaaaaaattgaattctggcaaattctaaggggaagatagagaatgaaggaagtggaagaggaccgaggaacaagggtgtataacgaagtggtggatgattagagtgttagggttagtaggttttatattcaattactattatgtgtattaagagtataataagtttatgtcagattatttcacttttggtcaaaacaagtcactttcaagtccagatgggttacattttaattcagaatgggtcacttttaatgttaaacaagccagctttgtataagtcaattgacccatttagggaataaagttacccatttatttaagctgggttatgtatttaaccacggacaattatatgttactattttaagagttacaagcaaaaaaggtatgaaaatcttaatatgtgataaagattgtggcaacctatctgtttcaaccaacgtgttatatgaggaagtttctcaaaatgtttgaatcgtgtatgagttgtaattgacccaatttttttatgtatcaatttagatggtgtaattgtttttttttcataatgtgttgtcaattcaggtttgatttcaatcaatctcattaaacaaaaatgttgctgacattaataacatgtctctttttgtctgataaataatttataatatcacatacaaatatggcctcccgtgcattattgcacgggttaaaagctagtataagtatataacactgttagcgatgctaatctctttggctgtcactttggatcaatacttgcatgacattactttgaagactttaagcatgtaatatcttgacgtttgaggaaagttttgtgatgaatctagaaccaattcacaattggatggttgatagtcgagccgtcgagcgatccttggttaagcccgactacattagaagaaactcaaccaaataacttcaaactcggtccacttaggcctagacgagctaatcagacgtaatatatgcatataaattggatagtcgaagtactcgaagacatccaactccaactgctataagctttatacattgattggtgcaaattggacgaggtaggaaaaacaggccacactcgcaccaatagtttgagccccgttaggcacatgtatgggaaactagtgtcttaggcctgttctctttgacataaaagaactgaactgaactgaactgaattgaactgaaatgaataatgatatgtgagagtaaaagagctgaattgaactgaactgaattgaactgaaaataagctggggagaacaggctctaaactcttattcttttaacaaggtttgtggtggacttactccctccgtcttctaatagatttttcatttctccttttcgcatataccaatgtatgttttgtaaacattataaaaatttgtttttcgtaatgtactaatgagatgaaacaaataagatcttaaatgactatatttttttttttcttatatatatatattggaaaaaaaaatattatgtcaagaagggagtatattctatcgaagtttcaatgtgggataagttagtttgcttctttgaacaaatgctcctttcaaacatccatgaaaaggaataggatataatatcctttcaaagtatacttactcttaacagttctattggtcaatttatccatcatttttgtattttcgccttaatgtattatttaaccatttttcttattgttaactgatggaagaatttataagctgagaggataaagaaaaggacatattttatgaataagtaaaagagaggaaacgcaatttaaatcatatatgcatactcccaaatttcaattacatgttcttttcattacatgtacctgaatgttcttgtcatcatatttacatatcgtaatattattttctatagattcgtctcaattttttactattgtatgtttttctcccaatttgtttttaacctaaacataaaaaaaaaaacgtagatataaggaaaagaatatccaactaaaattttaatggagagagaggtgctatcttagtggaatatcatgccgaatttcaggatatgtcctgggtgtgaatcctcatcccaacataatgttgaggattattcttgtgacggcagtgggtcttcacgtatgttgtcttatgggatgtttaactttatctccagcctctgagctggtatacactgcagctagtattctagtaaggatttagtattcgaatcaattatctttcctagttaaaaaaaattgaaattttaatggacataatatttagattacttaccactgctcaatctaagcatttgaagaaaaagttaacgtttactaaaagagattggtttagcatttttttattgaataaatatttcttgagcaacacttttgtctttttaagcttttataagatcaagacaagagtaataatcttgtaattattgagtgaaactatgcaattaccggtttaccatttcaaagggtaaaattatcttgtaattattgagtgaaacacattgacgtcggcaaaatgtttaccttctactgccagaaacccagcagatagtaccgccgacaccctcatacaaggaaacctaatcatttggttggacccacgataatcacatgtcaaatttctaagcagtattaatccaagctaccatgagtgttaaaggtaactcttgcctgtttggttcattaaactggaatggaatgatatggatgtccatattaggatggtatggttccagtcatccagaatcctataccagtttcaaattgtttggttcaatcctgtaatggattcaatgtccatttctgctgtttggttcacatttggaatggattatgcattcagttttttattttaatataattgtaccagctatatgtataaataaaaaagacaaaaatttatataaaaaaagacataaattgagaacaagaagactaaaaagcaagagagaaaagcgacggccgcaaggagtgcatcgtagcgcagcggcgatgagacggccgcaaggagtcgccgacgaagtcggaagcagttggagtaggaaaagcgagagagaatgactgataaccgagagattaccgtagtgaaagcagctacgaataagaaaaacaaaggaaaaatgctgaaaagaggacttccaccgccagcgccgatgccggcgccgggaggaatacgccgagcaagggtggtcagcgacggatgacttcttgtctagggtttaacttctctcaccgttccacacaaattagggtttgaaacttaaggggaatggagttagaaacttaagggggaggggagattgggattctaggggtatggggtggagatagatacccttgggtatgagactctatcctaaatatgcccaaccaaataatgggatggatgtcattccattaaaaacaccccaaccaaattgttctaaaaaagatgaagtattgagattgatacatctatttattggatatattattcattagaaatagataattaaaaagtaataaattatgttaaattatactacacaaattattaatgtttatttctattggatagacaaagttttttccatgatacaaatgactcacgtcatttaatttaattgtgcaatatagggactgttctcttcgacataaaacaactgagctgaacggaattgaactgaactgattacaaccgaactgaacttattgcaactgaattgaactgaactttattgcaaccgaactgaaccgaacttattattgcaactggacttaattgaactgaactgaaatgaatcaaattataactaagaaatgatggttagagttgaactgaactgaattgaactgaaccgaactgattgaaactgaacagaattgaattgaactgaaaataagttggggagaacagacccttacttttacctatcatgtgttttatacaataaaccctattaaaaaaaaaggtaagaatgacttgtatcatttaaccttgtgggctaatgctttttttccaattaatcaccacttttggcttgcaccatgtgttattttcaaggctttgttataagtcacaacattatattagcttatttgcattgcatgcttacttcattcacctttttaagttttatattgggatggtaggtgttgtagcctaaagatcgacagttctaagttggacacgtggattcatctggatcgtccacgtgtcccttgcttattgaagaaagtacataacaaaaggaggattactgaagtacaaatcccaatttggagaagtaccagcccacctttcaggcctgatttgtacttgggcccagaatcccaaaaaggcacctgcataaggttggatgatgtgtgctctccaataaatgtttgccacgtgacatgatttcattgtttagccaatcatgtgctcccaaattagggtaactttagggtacaacaattattcccaacactataaatagtccttgaaatcagcagaaatgtacgtttttcatagcagtgtactgttactctgtcataattctctctatctctactttctctctctgaaagtttcctttactactcctaatacttgatataagcttcggaagggggaataccacccaaacctccagggtgagtccctttctcgggttcaggatattttgatcaaggcattgttgcacaagtctctaatggaataacctgttgtgggaatagcagtatattagtctagcactacgtaacatttggcgccgtccgtggggagacgcaacaatgactgattgtcactcgtctaatgtagctagaaactgaagttttgaaattcgagtagaggatacggtggatgatgaaaggccaccacgaggaagggataggcctccggctgttgtcaatctccctggacgaagccgcgagcctgttattcaggagaatcttgagcgtccggtgacaactgcccatttgaaaaacgtcttgaatgactttcagactgttgttgttgttcaggagcagatcaaaagtaatatgctgtttttccaagtgaatccagatcccgctgctgttaatcttctaaagggacgttctctggagggtcttccatgaccaagcaagcctcctcgtcaggaattgtctaagaggctcaccaaaggaaagcagtcgaaggttagtgagcagtgaaagaagatggactgaaagttggtagtccgaactcaagacagtattcatccaagtggtcatagaatggagatcgatgctagagagtatttggaagccaaaaaggttgcggctctacaacgttcagcctcaggatccaccccctatttaagggatcctccattgaggttgtcgtccaagactgagggaagaagtctaggaccctctgctattcagccaagacaagagaagacggtattgcaacctatggtgtataggcggccagacctagcaaacacctcttctaacctcgtattgagggaatatcaccgggagcacatacccattgaaggattgtcgggggctctcaagattaattggccaactcccttctcggctaaaatcatggaagcaccccctttcccaaaggttaagctgcctacgataaaaccctttgatgggactactgatccagatgaccacatgtccgcatacaagcatcaaatgtatgttgaggtggtggatgacgcaacatagtgtaagaatttcccagccactttgaaaagggtggctcaaaaatggttcaacaatcttcctcctaactcagtgaataatttcgtagagcttagttaccttttcaccagtcattttatagcaaatcggcatgaacagaaaacaagcatgcacttgggcaaaatatccaaggaccaaaggaagctttaagaagttttgtcaaaagatttaatttagaggcattgcagattcaagatctgaatgctggggtggcctttgacgcctttatcagaggcttgaggtcaggaagttttaagtttgatctagtaaagaagaagatcactactctagctgggttcatgattctccggcttctttcatcttcttccttggacccatgctcctcgctagcagtgtcccgtcgatcatggtggtggtatccggtgtttgtggttgaggtagtgtttgtggtgaagcggtgttggttgcgatggtggtggtggcggtggtggcggtggttacgatggtggtggtggtgataattgtggttgtagtggtggttggtgtggaggttggagtgaggtgagagaagagtaagtgagagtgagtatatgtaggggtaattttaaaatgtagtgaatttaatatgggcgatttttagtaaaatacagacagtaaatagtagagcccctaaaagacggaggaagtagttaggagtgagaaactctaagtttcactattgtacatgctcttatagttatatataggacaactatcaaatgatgaatcatttaccaaaaggttcctaaaattgaacacaaaaaatccatccctaaaaaatgcatattagggtgcaattttgtatccctgaaaattacatagcaagagatgcaaaacaatgccatgatacttaatagtaatgatggggtagagtgcaaggttggagacccataaattgtgtacaattataagtttgagggttgatttggaaatcccaccttacatcaacatattctagatctctatttccaacaaaacactcaaataccattataattttatactatagttttctatacaactttattttgtggaataccttcatgtagtttagcaccaaccaaatctttttttatcttaaggcccagctcatgagcagcttttgaaagcttttacctgccaattacactcagtccctttaaatacactcacattttagccttctttacaaattggcactctctcacttctcttttctttggcgttctctgagttattatttacaggtaagtcatcttctttctttttacttttttttttttttttttttgcatttcattacatgatttttgtttgtgtaatctgggttttgatctattattatgtttatgtatgtgagtaatgtagaaaacatatctagtttgtgggtaattctgattttttagtaaattgtttcacttgtttttactgttttattataaactgatctagatctgtttccattttaagttattatttgcattgattgtcaatgaaataatgtactataaattcactgcttttacttaaaaaactactgaatttgaccaatttgatgaagtttgatctgatttatggctaaagagttgagctttttgtactttgggtttgctgcattaagttcaatcaagctagattttggctaattagatgcttatatagaatgaagtttagaggtatattaatctctgcatgtagcttcaatgtgcttagtttgtccctgaatctgaccatattgtgagtattttgctatcttgtagtcagatttttttttctatgattatttgctcttgacttgttgctcttctgagttgactggccaagatctgtaattattgcttgattttagttgtacatttaatttttgaggtctgtttaagtgtcatatcttacagatttacttgtgtattaaagtctaactttgactgctgaagtgtaaatttctgatgggttttgctcaatttgcaggaatttggagagcttttgtggtaaaaatctataaacctttactattaagattagctgttacccaaagaaaagatggagaaaaccatgaagtttttgtttgctacaattatgttggtgatgttgagttctcctttggtaaatgctcagaaaaagagcaagcatgttccaaccccaaccccgtcaccggcccctgcgccaggaccagcctatgtaaacctgactgaattattaagtgttgctggaccttttcacactttcttaaactaccttcaatctaccaaagtcattgacaccttccaaaaccaagcgaacgacaccgaggaaggcttgaccctctttgtacccaaggatagtgccttctcatcccttaaaaaaccttctttggctaacctcacccatgaccagcttaagcagctgtgcctcttccacgccttgccacactactactctctttcagagttcaagaaccttagcagcatggggcctgtcagcaccttcgctggtggcgattacaccttgaacttcaccgatgtctcgggtagcatccacatgactacagggtggagtgtcactaaagttagcagcagtgttttctccactgaacctgttgctatttaccaggttgataaggtgcttcttcctgaggcgatctttgggactgacattccccctatgcctgccccagcaccagctcctgaggcgaaagcccctgttgctgacgctcctgcagatgtgactgcagatggaaaatcgccctcgtcctcacccttgaatgcttcagcgtcttgtagagttgtagctagcttggttctggcactagcagggggacttgtcctactcttgtaagaaaggatagtattggtggtttataacttatatggagtgggtatgttcccaatatttcctttgattgtttcatcattcttttattcccccttttttctatgagatattatattggaaacattgtatgtgaaatgtaagattggttttgagtaccttgtctatcaatatatttagctcatttatgtcttgttcaagtttttgggttttgtttggtttcctgacatacttctatgtctgtcatactatccatgttggttggttctgtattaaaatgtgcaataatgtacttggtttagtaccgtgaggtcataggattaaaccctcacaagaggctcactcggggtctcgcttcccaaattctttctccgtcactcttaaagttaaagggtttgacctactaagttcgactgtttgacataataaatggtctactaagttcgactgtttgacataataaatggtgctggtgtagtaaggtctttttattacctatacaatatatatatgtaaagtaatcaagaagctgcacaaccaaggaccctcgagtccaatggtatgactttctatctactacatgagaaaccaaggttcaaatctgggtggaagcaaaatttcaatattgttggggggagggggttggggcttgttggacccctggataattggtcttatgcgagaataacccagaggaaattcatcttaccacgagtttctgaaaggggcttagaaaaaaaataaaaaaaatcaagaagttacacaaggcaacctttccttaaccctgattgcaatattttgcatcttgatttccagggaagatcaagctgtaagcctgtaatacaggttaccagagggccacttcccacttgggtgttcttttgttatcatcaagttgctcaccttttttgggtgcggaagttgttcactttgatgattaaaggattttatgctaattaagacatacttggagtcttgaagaagtgacatctaaagacagaaacggctatgttgggctcataagtcataattgcctcccttctttttgttccatttgaccaaatgaacatatgaaagagcattaaaggtatattgggtgtaataaaagaatcttaaaaatgaggcaagaaatccaggtgggaattgagtggttatattggatatgagttttataaccgcgatcccaagttcgaacctccactagtgcatatggaaatttccgcctttctccgcattgggcctgtagatggcccgactttgatgcctcagatagatgggtgggctaaatcaaagcctacatgaaagaaataacaagacttaccaacacccaatggatcagaagaacatctttgcaataagattacaagtaataaaggtttttaagagatttttttcttggtaattaaatctgattttaatcgcactatactgtatatatcatagccttagcccaaatcatcttgagagtggataaatggcaagggagctcacttgcaatatacatctagtgagacttcatcataatcctaacaatgtttaggaacaaattacaagtttggtaggtttttaataaaaaaattcatactttttaaggttgataagatgcatgatccatccatgtcgaaaccttaacttaaaccaagttagcaagctagtgactagtcactttgagagtgagggaaaggataagaggttccatcttttgaagtgctcctaatcgagattaaactcctaactttaaagttgaaagatactttcattttaattagatcaagtttgacatgataggtttccaagagattacatgagatacaaaaatcttaaggtatctttattacataatattgtcatatagtagtctattgactgaatttagtcataaaaataaagaaagataatatcattaattagtacataaaattttaaccctcaaaaaaaaaaattagtacataaaatttttgtctttttcacaaaatacaaaagttggagatgaagaagtgaaacattaaaaagaatatttagagaggaggcatacgatgttatcttaagagaattaaatgaatttctaggagttttttgtcgaaaataaaattaataaaagagtcatacaatattgataataaaaaaaaaattaactagtaaaagtaaacaattaggatcaaatttaatattttattttcaaaaaactatgatcatctcaatgaaatttggcatttcttaataccctttacatttaactaagctgaaatctcttttattattctattgtttacgttgctcgtttagcaaccataaataataactatatgactcatatgagtagtgtgtatattccaaattctaatacttttatttgttttcctttaatagtttaagagatgaacttaaagaaaaagatttcttaactattttcttgtaccaaaaagggaaatttttcacgagttatcattgaacttttactcaatgcataaatacgaaagtacccttatgtttcaagaattgaattgtgtacccgtctaagttttgtaattaatacaccaaatacccttataaaaaaatgttagttaaccgtccaatcaattaactagaattatgagtttgaggtggtgtaatagtgatatcacttttaatctcgtatccctgagattgactgctcaaacctcatgacactcatttaacaatttcccctatatccccccgaagtgagtccccttcattttaccttaaaaatatttttactaagcaaagtttgacctaatggtaaaggtcctcaagatttcaaggttatgagatcatacccccactagggctctttgggggtgagatttcccttcccatcccccctcctttccaagtagtgggacctgcaaatatgactgattaaacctgggcgagatgtcagttcaataattttaatggtttgtgaaaaaggccatgggaacataactttcaactgattttggaattttggttagctagtacggggtttaattatacctgatcaaagtgagtctggctcgaaaaatgcacatgcttgtgcagatcttctgggcccgaattttttgggtttaatatgagttttgggcaacctaaaatgagtttttagtaaaattttggaccgatacgattttgaccttaaaaacctgttgtttatggcctaataagtgggattttggcacaaaattttacccccacccaccatttgatcacctttaggtttaataaacaaattttatgatgtttgatagtcatataaggtacatagtccgttttctacaaagttgaggatacaaaatgtatccaaaatgtcaaaattattcacactttaaaaagattattgtcaaccaagtagacatggccatgggccaggcttggcccaatcctggccgattcgaggtcagaccggttcagcttgatatgagcctatattagatcaattagctgatagatccggtcctattcaggtttagggttggattttctcaaacatgaactagttcggcccccgctaagtatggttcaatgctcgggctaggttgggccggttcaggcttagcccaccgattcaatgtttttttgcttaaaggcaaaatcattttaaatttttaaattttaattgcatatgcactaatatttacaataaataatttttgatactgcccatatttaatgtttttaataactgggtcgaggtttaagaatttttatgcattttcacgaccggtttaacgagtcgttttagggttgcatgttgttcaaggtcctgttcagggttagggctaagtcgatccggcgttgacttttgttttttcaggttttttaatgtcacattatatcaattgatctcttcaaaccattttttaatttttcctaacataactagagatggaaatagatcggattcggggtgggggaagcttcactcgcatccatccatcactcgcataagccatcacccgcatccatccatccgtcttccaccggttgaacggatgggtcagatggttagcgggtggtgatatattagaacttttacaaaaaattatgtcataagatacatattaaaattttcaactaaaatctttaataatgtaagtaaataaacatgtgtaattgataatatatgatggatgagtgttaaccgggtgatgggtcgggtggcggatgaaaaaaaatctcacccgcatccgtcacccgtttttcatccatctatttcggggttttcacccgcttaataaaaccgggttaagcggatgattgatgatccatcatccatttccatccctaactattctcatttccctatatgcacacgctctctctcatatatttttgtaacattttgtaccgccaatccactattaaattcctattctacttaaactaaaattgaaaaaatcatccttctcaatcaccctctcattctcctggagtctcaagcaatttccacaagggtaattttgtttttccacaaatttgaaaaagtcaatgccggaaattggtataaggtagttgtcaacaacaaaatcataaaagtcaacgccggaagtagtttctaacaaaacttgaaagtcaaaggtagtttgggacaaaatccaaaaaataatataaaagcaaagttttttgaaaaatgtagaacatccaaacacgtccaggagaatttaagccgtccacaccaccaccactcttccaccgtccacatcccacacatgtagggaagacgttccacaaaaaaaacaacattaattaattcattccatattctcaatatttcagatttctgtccaaaatagctttgatttcatcaaataacacaatataaaatccaaaaaaaaaagaagttttctttgtcatgctaaaacaacagagtccctaaaatctccaatgcaagaaatggcgaactttttagtcatgtttttataggctttacgtttttttctctcctaactttctctttcttccatttcaagcatgatattctgacaaggtctgttttttctctctcttcttttcttaatcttcatttttcttcatttgggtttgttgtgctgttttctttatgatcaatcatctgttgttttgatgggtattgaatatgcgtaaaaatttgttttttgatgttttcacggatatttatgaaatgggtattcttttatttcaatttttatgatattttgtcataaatttgattgattgttctacatttattgtagttttgatggtggtgggttaattgcacttttgatgataggattgaagattgaacaataaagaggaaaaaactagatattgaagatgtctggatttgagggtgtaattgtttctgatcctcggttacagagtcaattcacccaagtggagcttcgcagtcttaagtctaaggtttttgacaaaaatgctgttttatgttgctttgacttctgatcattaattttgtatgattaatcaatgtagatggtgtgtttgtttgattgtaacatgcttaatgttgggtttgttaacagttttcagcattaagaactcaatctggtcgtgttacggtatcggatttgccgccagttttggctaaacttaagggtatcaatggatcctatacggaaaatgaagtcagagctgcattggaggattcgtatcctgacgtcactcacgagatcgattttgaatctttcttaagggtgaggtttttttgtgtggaatcatgctgtaatgctgaattttccctagatggaaagtttttattgtggctattgtagttgtggccatgaagcaatattggaaagatatcatgttgttcttatgtttgcttagtttttctaatgaattgcaatgttctacctattttattatttggagagctaaaccatttcgagttttgatggcattggacaggaatatcttgggttgcaaggccgatctagtgggaaaggtgctgggtttaaacgagcttcttctatcctcagacaatcaaccacaacccattttcatgtcattagtgaatcagagaaggaatcttatgtgacacatattaacaatcagctggcggaggatccatttttgaagaactttctaccaatagacccgaaaacaagtcagctattcgaccttgcaaaagacggagttcttctttggtatacacttctggctactggatgtttttcatagttttatagttgatttgtggtttgtatacttagcctatagcttgcttgaaagccttaaaatattacctctccttgcagtaagctgattaatgttgctgtgcctgggacgatagatgaaagagcaatcaacaccaaaaagaaccttaatccatgggagagaaatgagaaccacacactttgtcttaattctgcaaaagctataggttgcacggttgttaatattggcacacaagacttggtggagggacgagtaagtcatcaacaccttgttgtttgcattccttggtatgaatatcttaaagttaattgttactgaaccactgaattgtcatcatgtagcgccatctgttaatggggttgatttctcaaattattaaggtatttaatccacttctcttcacctattggttgtaacttgtaacctctttagcttcatatatatcggatttgtgcttgcaagtatggaattgctagattcatgcaatgttcctgtatgctatgtaaatcagattcaattgttagctgacctcaatttaaagaagacacctcaacttgtggagctggtggatgataatcaggtctgaagcttcttgtcttgacatttttgaaacattgtgtactactttccacgtggaagctagctagcaggtttctgattatgtaaaactttttgcaggatgtggaggagctcatgagtttggctccagaaaaggtcttgttgaaatggatgaacttccagctgaagaaatcaggatatacaaaggaggtgacaaatttttcaactgatttgaaggtaagctcttcaatgaccctgaaaatgaaacttccagttgacaaaacttagagcatctgtttcattggctattcctgcttctcaatgagtagtttttttagtgcaccgtaatatggtgtaatctagcattctagattctagaacttacggagatcgagaaataaaaaatttgcgaactgtgcatctgagaaactattttgcaggctatccatgcaactttgactttgatgaatctgttttcttatgggaggtagattttgatgcacgggcagcttattccttgaggagggaattgcttatatttctttaaactataattgcatggatacatatgtccttgtattggactttgacaatcttgagatttggacaaatgaccgggggttgagtgggatacagggccgacttttgagatgctccttccagtgtaaatagtctgtttcatatgccaaattgttaggaatgctgcaagcctgcaactattattgtagtagctacatatagtctgctttttacaaggtgaaacagcataattgaacttctcttggcttagtatggaatggacaaactctatcatgttgctaaggttactgtatgcaattcagtatattatttatggcaatgggaagttctgcggaggcactcgtggaaattatattgcaacataaccgaggtttaaattttagctaaactatttcatgatatatattaggcaattcctctggtttcttatatccagctgcttatagtaatagaatttagtaagcttttgagtttggtacctggaatgaaagagcttaccagcagttgtagttagaaggtcatgttcatcaaattcctttctgtcctgcctgcggtggaagccttgttacaggcactgagtaatggtatcatgtggattaagaatttaagattgaaaggactattcttccccgaagcctgtaaattgtagtaggagttaagaagtggatcttgagaagagttaaatttttcctgggtggaaatgactctggaagcattcttatgcatcatcacttcatctgaaatgaaccatctcggaggtatagatgcttctggtggaatccagatttcaaatgttgtgcaattgatctgttatactaccttcttaaaatatttgccagcctaaactcaaagttcgatatatgcagtttccttggacattcaaaaatgatttatagatctattggatgcaaattgggcttcatttgaaattcataggtctgttgaacaggtggatccatcagatattttaggaatttagtaagcattttggatccttgtcatggcttagctgctgtatttactttaagcatcatggtgctttgtttaggctaccaagcatagagggagaaggcgaccttttgtaggtttccatggttctatgctttcttgtatggagtaggtctcaaagagaacaacaggtgaggcggtataaacggagacaaaaagaatttgaccatcctaaaggaggattgatcactgtaacatgcttctggaataattaagtcctgatttccatctgtgcaatgatgcacgtcagagacttccttttctatttgttgggatgaaagaagatgtttgagtgaagtatggtaattggtaaggatacaattccttgaaatggatcaaagggctagaaattctagttccattgaatgtcagtaacagaaccccctttctctgcaaagacaaaagttaaaatgagaagactctagtgttcttggatcagattcccatcggaatgaacttattcgactcatattttcttgtccttatctttcccgtggtggaaacaaaagttcctatgtaagctggtactgaagaaacaaatgtaaaactttgtctgcactttgtagaccccaggaaacatccaaagagagagccttaactgttaatagtcattcttatggatccgacctgaagcaaaagtgttgatgcatcaccaagagattgaaatataaatagctttttttatcattattatttcctttttttgttatggagatgtaacacaaacacttaaggagattctttaagctggacttcttagaacaaagcaaattatgagttgactttaatcaaaccaattgtctagataaaggctttcatcttattaggaacattgcaagtcctacgatcttgaagacattattagtgcttatctgaaatcgtgaacccctaacatgagttaagaaagtctgttcatcagcctctagaaatgccttcgtgtagactgcttaaatactatcccatccaagcttcctcgtactaacaaatggaataaataatttttacttgtcttttaagcaactttgtttccaaatttaggtattgtttctggtcctttgagctaatattataccaaatcaatttagtaagtagactcctctttttcttcatcgattctcactgaattggagttatttctactgattcaaaccgaaagttatttttgcaaatcttaagtgttaacacatgcaattactgattaaaactgaaattttctgataagaattttgtactaatgaagctgatttttggtgagtcaaatttttataagttgaacagaagatggccctgtttggttaagtgaagaatttgtttggcttatactttctcaagcccaaacttctaggagcttttttatatgacagacaagaaagtgcagaatttcactgtaattgagattccatataacagcctctatcagatgaggagttgttagttgaaattacacaatcaaagatatgtgctttggttgtatagctctgtatgttaggtgattacaagtcaagttcagcaacagctgtaattattgtgttctacaatacaaaacaatctaatcgatcgaatgatatgctacatttccaggatggtgaagcttacgctcatttacttaacgtacttgcacctgaacacagtaccacctcaacattggaaacaaaagatcctactcaacgagcaaaattgattgtggagcaagcagagaaattggattgcaagaaatatattagtccaaaggatattgtcgagggatcaacaaatctgaatcttacatttgttgctcagattttccagcacaggtaattctttttttccactttccctttgtatgtttcagattatcaccaccttgaatgaaaaagttcaaaagttttataggggagactatgttactgctaaagcttagacttactttcctgccaatgtcaccagcatatttacttctatatgaaaataacatttgccatcatcaagctttaagctgttcaaatcaggtcttggttatttcattattcatagttattcatagtaaggtaaattgaaatttatctctcatttctattttacattctttccttttttacaactgtttgcaaaaactatgttgtatgtacgtatccccatgagaacttggtagcctcaaattttcattttttcggaaacttaatttgaattgcctatagatcttttctttactttctcacttcaaaccgttgcggaggaaatcagctttgaggtggccatggtggttgatgtgatatctgagctgttatatcagcactatatgtatcttttttatttttgagtgtttttagggagggaaggagagaggttgcgttacaccttcatttgtatttggaaaaggaacaccttatgtctttatcatctacgcaagagcatattatatatgttgccacatggcacgtgttataagttttattttttttgattgtacgacactcagcatcaatgcaggacttacatgtaaacatgtcttgacgaactttccatactgaatgttgcaaatttggtcagaaaatcttttttcttcgtagttatggggttgatgatggtgttgtgttgatcccctttctctagtgtagggcatgtgttatttttgcttctgtaattattgaaatattcacaaggtttcaactttgctgtgcagaaacggtctgactgctgaggttgatactgagaagatatccctaacgaatgttttagatgatgacactgaaacttcaagggaagagagatgcttccggctttggattaatagtctaggagtttcaacatatgtcaataatttgtttgaggatgttagaccagggtgggaatcttgtctcatgctgtcatatctagaatgtttatgaagtttgattaggctaatttgcagtcctccttcgcaggtgggttcttttggaagtgctggataaagtttctccaggatcagttaactggaagcacaccagcaaacctcctatcaagatgcctttcaagaaggttgaaaattgcaatcaagtcattgatattggaaaaaacttgaacttgtccctagtgaacgttgctggaaatgatattgtacaagggaataagaaattaattataggttagcttttcttcgccattttctccatacctctttggttatactatggatcctgagagccttattttcagaatatttcagacatgctgtcaaaattgtgctggtgcatgtgtttctaaggcattagtatatagaagtatattattgatcattgatatttcatgagccctagcggttgtgtgccatggcattttgctgagcttaattatccataaaaccatgtcatgccccagtataatgccttaatatgtatgtttggatatttgttgttttcctgcttttcttagcttaatctgaaatacatctaacctatttcaaatatggtctctctcagcctttctctggcagttgatgaggtttacaatgctccaactgttgaaaaatttgagatctttttcacatggaagggagattacagatgcacatattcttgattgggcaaacaaaaaggtcaagagttcaggaaaatcttctcaaatggacagcttcaaggtatgtactactctgggttctgtaaccatccatatctgcaatcttttggtagctatatcaattaaaagttgcttgatttatgactgagcagagtcgatcttttacaattgagtctgatttcatttcaggataaaagtctatcgagtgggatatttttcctggaacttcttagttcagtggagccaagagtggttgattggacagttgtaaccaaaggcgaaaatggtacatcgtcactgtgttgaatatgcaactaaaatatctattttctatcattgcttcaaagaccaccccctttcaattctttatggaaaaattgtcaccataaatcccatgtttgggatgtcttctgaataagattaggaattttgaccccaaaaaaaaagcaatattgaacttgtgtaacaagttttcactggggaccaaaagcgagaagggtagcgccaaacttgatagataaatcaagtttgggattaatatagagaaacactccaaacttgggatttatagtgaccactttccataatttaatttatttacaattaattctaaaaagaaagaacatctgaaatgttttccctttcacctaggatgttcagtgtccctattaaaaaatgaaatccatgtttttgtttgcatcttgcaatagcagaagggacagaaaattgaatgctattgataatctttatgtgaccacagatgaggataagaagctgaatgcatcttacataatcagtgttgctagaaaacttggatgttctatattcttgttgccggaggacattttagaggtaagaaattgtaatccttcaattaatcgttgtgatgctttgctcctttccatttttcaacctgctggctgtagacgttagttctgttattgtttgcttctgtcattgtttctctgtatagttggtctttcattaggttcagatttaacaatattgtatgctttcttttgacaggtaaatcagaagatggtacttaccttaacagcaagcatcatgtactggagccttcagaaaaaacccgggcagttggccgttcttgaagaaactgatcctgccgaagcatccgaaccccaagaagaggaccagccggaagaggaatgattttttagtggaacaaatgttttttgagtttgctttatttttttgtgttcaattttcttggccataccaacaggaagtacttaaaacaaaagaaagaaataggattaacaaaagaaagagtcgaaacgtaaaaaaaaatgcaaattttgtttagttacttgttttcacatgtaaattcacttaaatagttaagatgtatacatgttggcacaattcatttattggtgataagcgcaaagtaagtttgtttgggttgtatatatggagcatcgaaagagcttctttttcttcattattgaaaaaacttgagcttggaaaagctggtagttttactgcttcaatagatatctagaagtggtggtggagcacaaaagtacccaagacaaatgagtatatcacacaagctactattgttatacttatatttcctatataatttcgttcgtattacaaaaaaaaaagggaaaaggatgaaacaaattgactaagagcatggccacagaatttgggctcaactaaatagtgtacatcaaagcatataggtattcattttccacaagtgtaaaagctagaacctattcacttagaagtggaaaccattccataagcgtagtttccaaagcgtgggattaactgcctcttatacattgtggaaaaaggaatgatatcagtatgtagcacaagatacagaggcccaaattcaggcactcatgagtcatgacttaaatcacaccgcatctgatgatagcaccttggaccatcactcagatgaaatttggcttactgtgacaacagtattgcacttctatgtattcacaatatagcttgttaaattctctattaaaccatcatagagcatttcatagttccattaattgaattcgacatctctttctcttgttcttgttcggcgatgtgcattagcatctccagccgcttgtcaaaaagtaaggcactctcatctctcttatccaactcagcagcctcaatctcgagccacttctcccgcaaatcatcaagaatgttcccctggtcatgaattcctcctcctccaggggcactaggggcagtagtacggagggacgagtctcctgatggtggtggaagcgtcaaaagcatcgctcggaattcttgtgtgtcggcaaatgtctcaaagttgcaagccatcgcatcgagactgtactccctaattttcaggacaccatacctacataagcagccaagttatcatgaaaattaaaagaaatatatacataatgtaaaaaagagcaaagatcaaaattacaaattaaaaagcttatgtagcaagcaaaactaatgtgaactagcagatttctctaaactttcagctactgaaacagagagattttgtcctgacatcccttcttggttacctatggctatgagtcaatgactagcatttctttctcccaaaacgatggaagaccacaaacaagaagaaaatgacttagcagtgtcgcaatatgatgcaagagcaatagagataatatcgctactagctaaaagatcaagaatatcctaacagcaactgtactataaggtacacggagatcataaaagtggctctcaggaaactcatgtccaggttccatccagcgtccatggtaaataatatacaccacaaagttaacctatgattgaactgcaaaacagcacaagaaacaaatatgttgcaaaaaattacaaggaaaaacagaagttatatattgagtggactaccaattatgaataaacatcaattttcttcaagcaaaattgcaaaagttctcaatctctgattcttacgttcaccaaggcattccgaaactagattgacttttcacttttttgaaaatttataagttaaaaaccctccaaaaagtgttgggtctggataaagatacttaacaattcaaggaaccaagattccacaagccacagatatatatgcgttaagccttttcctttttgataagggaaaggaaagcttcagttagtacgtgtcagcagagtatacatataaataaagcaacctagacaccaagtagcatgaatgtcaccaaaaaaatcccttctacacctgattgtatagtttgccttgctgtatctatgtcaaacatgcatcaaatcaatgggcatttgcaaaattatccttcaaaactatagggaaacaagaataagatccatcacaggtgcttctaacatgtctcagaatactttgaaaggctcctaatgacaaaagtatgaatatttccgaatgacaaaagaatgaatatatcatacttcttcctcactccatatatattttatcattgcctcttcaataacatggttgccagacatttgaacagatagttacacttcaacccgaacatacaatttatgctgctttatccgatggaacattagagatgcatgactgtctagtctgaatgttcaacctaggtcctagtatctgaactggacggcaaaactacaatattttgagtaaatatcataagtatctcccaatcacatactactttatccaatttagcatgacagacagaaaatcgcgaaaagaaataggcatacaacttcacttgcatctgctataccctgtaaaaattaaatacataaacaattaagaacttacatatctgctaatagcagccagtggcataattctgaaggtgaggccatttctaggtgcgggagtagtgcatcagctacagcacgcttcaggggaaataacaaatatctcgaagcagcatcaaataactcctcagcctaatacggagaaatagcatttcttgagcagagagaaggaagaagtatatactcattacagtaataagaagctcacctgttgaggatccacatctttcaaaacatcagtgtaccttcaaccaaaaaattaattacaaagttagcacatgccaaagagacaaagaggataattatcagaccatgtgtatgtgagaagacgtagatttagcagtccaaattttggtagagaaaaaaggaactctaaagtagcagcatatgaatcctctccgaataaaggggatagcagcatatatatagtgcaccataaaacatgtaataagtattatgcaatatgcaacactctttaataaatttttcttgagttcgacaagctatgcaccaccattgatactcataaattacatttgctacagaatgctgatacgacagggggggaaatacatacatgtattctatcattttctcaaatgcctcatggctcaaatcatgctcttcaagatagggaagagcatgaccaagcacgttatcgttcacctccagaaaatcatccatccgggaaattcttgttctgaaatagtctgatctggaagccaagacaacttgatggcagcggaaaacccacccatcaactccaacacatatatcagcaagatcattcgcatgttcatggatctgtaatctaccaacagaagctactaaatttagggcaacattatctacgtcctgttttgtagaggaattgttcaaggaaagctgaagaatatgatgtaaagcagcaggaagacggtcttcctcaggaagggacaagccctgcaatacaaaacgcctttgcgagctgtctatttcttgcaaagctttgtattctgtgaacttctggtgagctagttctttctcaatcaccctccgcatttcttcacattcacaaactttgcaaattctgactaaatcctccatgtcatctactgcaacctctagccggtcagaataaaagaagtgcaagaggctgtagagagcaggataagataatttctcctttgaaaatcttacttctcttcgatacttccaatcattctcaaacttcctcttaaaatatggcgaccgagcacttaaaattactctatgagcttctatgggcctaccgtgcacataaaatacaacatctggggagaagtagttctgattgggtccatccagcttcgacgagcctacagaacacaagagataaactagtgtaaggcttcacaggtatataagttggatggcatacagaaatcatgaaggagtaatggctgaacacttcaggaagcattcagacaggaaggacacaagaagacagaatggcattttcaatttttcattcatgaccatggtacgaaaatacggctgaatcagttccattcgcccatattggaacaattttcaactttggcaaaccgaatttgaccgtttcaaactagtggatttaaataagctggaattttggccaaaccaaccatgacaaggaaatttcgcccacataacctgaatttcccgtattaagacaatactttccaaattttctttttcccgccgctccctacatcttcctctaataatgacataaaacaacctaaaatgatatagatcgagagaagaagaggcaagcaaacgacaaacacaagatctatggtgaatggtggatttaaggggaaaaataaatgctatatgagctaattttatggtatacagtgcaaataacagtatgataaaccgtgatgcaatccatgtcgaaacatttttgttcccaactattgccacgaaaccgcaagcgtttttacgattgtgaccaaaaccttatcttcaaaccaagttcatgacaataaagaatctagacgcctatcaaagaagttggtccataacccaagtaatagatgcatttaataaaagtgtgagagtatgttctcttcaccccatgcataggacctcagttagaatctttcctttatttctatttacgatgtttatctttatgctctctagaattctttattatgttttctagaaccttaaggcatgtttgttgggtactttgtgcaagttgacctttgggcatgacctggtgctagtttagacaaattattacgtttccgttgattcagtgttcaccactatgtattatttaagcctgttgtggggtaatgaatagtgaaaccaattattataatcgttattagctgctttatatgaatagttgtttacccaacatagaaaatgtgttgtctttcgcctttcaactcccacctcaggcttgtcactttttgtaaagtcctgctttccccaactcagttcccgcttgtgcctgatagctctcagtaagcacgcccaagcacggactgtcgcctgacttcgtcaataggcaagtatccctgttttcaattttgaagtccctttattcaagcactagccctgttccccatctggcttgcccccttgtcgccagaaggcaagagtgacgccacaccatgagggtgaaaaatactcggaccaacacactgcataaggaatgtggcaaagtatctttacttatccatagtacaggggaacataaagccacttcaccctccctccgttcaagtaccctgcatccccccccccccccgccccgttgggtactgggtgtggagatggtaattggaagatgaagaagaacgaaggaagtggtgtgagattcattgcgtagtcggaacgtgaaggagtgtgtgtgtgttgttgtgcgagtggtagcaagcagcccgtaggtttcaagctcatcaaaaccccccccagcaggtttgggggagccaaagagctcgagtcatctgccagcctgcagcttcacaacctccgcccaaaggtttccgcacctcgctcccgcgtgtagcagctaggccaagttcgtgggcttggcttgcttagttttacttcttctattaggtttcctatttctctcattaacatataaataggttttggagtttatttctacatattactctaagatagtgtgaagagagagattattcttcaatctagagaacctagatagaagttagagagtctagagattaaagacttctccttgtatcatcatctcatattaaaagtcttagtgcagtgttcgtggtttttctccttattcaaagggtttccacgttaaatctttatgcgttctttattgctttgtttcttaattcctctgaatattatactttattgtttcatttgttagcgcctacaatacatattcctcacatccccccaccgggcccctctccttccccaattgaaaaaataaaatacatacccagagtgacttttaaaaattactactgaaagctcttgtagccacctctaaataacaatagtatctaagagctagtttaattcaacattatttagctctaataaacggaatcaaatacctattccctttcttcttgtttggttcaacttctccccaatgcattaccattacttggtggtaataagttcccctaatttgttacttccccttccccattagcaaaatccaaatgttagtgataatggttttctttttgttaccatttcagtactctatctgattacatttcctttacattccatgacctagaaccaaacatgctctaatactaacatattacagcatagaaacatcattcctcaagaagaagacacgttgattattgatataccacagttcaattccaagattgtcaattcaacttgatcataattataggccttaaaaaaacccaggtccaatcatgtgtaagcataaagtaacaaaggaaaataagggtgatcaggttcaatcggggctaataagttctcaaaagatggttacacactacagtttaaaaacattagaattcagaaacaacaaaggcagctcaccaggcaagggaaggtgatcatcagtgaagtcgaaaagcgggcgattaggcacacaggcaaggaaagtgtcccttaaagcagcctgaagcggcggcagaggcggaggacgagcctcgaaagctttaagaagcttcctgaccttaaaattaagggcagcatagtgacaacgatcaccatcaaaggtatgctcatcacaaatggcgccattaagaagaagcataagagcagcatcaagatgaccagctaaacaagcatagtaaagagcaacagaatcccacttgtctctagcattgacattgacaccggattcaaggaggtatccaaggcggtccacgtctccggctcgtgccgcctcgaaaacatcgccatgtgggaccttctttgttggcagggacgatgtaaggtcttccacctctaggaatatgtctgacagatcggccatttttaattttggattttggatttagggtttttggtgggggttttgtggagaaggatgaaagagattttggtggcaaattgcaaatgtggtggggggttttgctggggttgaatggcggttggttgtatgattttatagttgcagacacttgcagtggaaagagaaagaggaaaagggtaggatttttttgtcattatatgaaatggatatggtcctagatggggtagtgggcaggggtgttcatttcgtattattcgatttgatctataatttcgaatagatcatttattgtcgactcgttgagaataattcttacaatgacctattaaaagtagaatgcgtttcggtgggatccctatgaatagaaaaaattatcgtcaaaatgatcgaatgacaactaaagaatcctttagatatgatgcaaaatgggtcttgttctatacttgatcatagttttatgtatgagttatacgaatcggaatcggaagaaggggaaggagcccttgatgtataacagatataggaggattgattcaatcacatagtttaagttcctaagagaaaatgtgatatgaatccagtagaaaaaaattagaatttgaaatatacaaaatttaggattgaatatccgaattattttttttatttgtcattctatgtgaaaccaaattttagggtgcgaagaagaagggtggtgcactggtggcgagggaagagcaggggtggtgcactgatggcgtgcaaagagcaagggtggtgcactgatggcgtgcaaagaggaagggtggcgcccaaaaaggaagggcaaaggttggtgtttggtgggaagggatggcgcgcgaagaggggggtttggtgttgataggctagggttggcggctggggagtgcgaaaaggaagggtgaaggttggctgctgtgggacacacacaaaaaaagaatactagtggaaaaaatgaagaagggctgcgctttttgacagcagccctttcaatagcagcccttcacattttaagtagggcgcagcccttcatggctagaagggctgcgcttttacctaaaaagcgcaacccttcctaccaaaaaaaaaattaaaaatttttttttttttgacattttctgaaattatacagaagagaaacgaaacgaaaataaacccaaaacaaaaaaaaagaacgaaacgaaaatgaaaaaaaggaacaaaaactaatacacagaagttatagatctgaaaatacaagaacattaatcaaaacaaagagaagtatacaagaacattaaatcaaaacaaagagaagtatacaagaacattaatcaaaacaaagagaagtatacaagacctatagatctgaaaatacaagaactacctccaaacattaacctaataatgtttaaatacataaaacaaaaccctaatacataattaaggaaaaaaaattcggaaaaacttaaaatggctatctggatgcttaaacgaactcggatggctgagtttgactcgttggctcgttccgcttccgaaaaggtatcacaataggcaatcggactccgtcggcatgattcgtgcaaatcatttcagcgtttttgtcgcaacgtttctgggagtttttgagaggatgagagagaaggaggagagggaggagggacgtgagagaatgaaggaggaaaaggaataatgaggaacgtgagagaggagagagaagaatgagggatatatttgacgaatcccgcttaatatttgaagcccgcgaacttttttatttcaaatttttttaggaagggctgcgctttttttaaaaagcgcaacctacatggctacatagcagaagggctgcgctttaaggaaaagcgcaacccttcctgcgcagccctttctgttttttcccctagtggaaggacaaatgctcgtgggcttgggttggctgttgaggcacgtgaagaggaagggtgaaggctggtgggctcatagctggtggtatggtggcctgtgaaccatgataaggttgcaggctatgttgtctgcatgagagaatgagagtttaggatacaaaaaaattctattttttgttaaataaagaaagaagaaagttagcatattaagaaggttcggatatttccaatatttaaaatgaaaaattttacaatttggattcgatttgatttttttcggatacccaatctccgaaaaatcagaaacctccaaatccagatgaaaaatcctaatttttcgaattggtttttttttaacaaccctagccacgacatatgagaacttatcctccaaacctccaacaatgggtaactactaactaagtcacatgcaaaaatagaacagtgagaaaaaaagatgagagagaaaaaagtagagagagaaagaaaaagaaaggagaaaaaagcctcaattccaagtcccaaatccctagccatcaaaaaaatcccaattcaattttgagaaatcttctatcatccagcatgataaattgctcttagttattgtttttaacctcctgttatcaactctaattgcaaagttcaatcttctgtgctaaaaaaaagtcattattcagtccaaaaaaattcctcagtgtgaggttgtttcttctcgaaaaaaaaaatcagtttatgaaacttatgcccatcttttattgttagtgcaattaagagcttcctcatcatatttgggattcagagttcaatcatttgattggattaaaggattcatcttccttccattcaaattcaaagttcgattttttttctgatctttacatgaaacgaaagttagtttagctaaataaattaaagaaaacacctatctttcataggtcactaggaagccacgttgtacctagttttagtaacttgttaaggtttttgtttaattaatactccctttatttctatttaatagttacattttatttttttacgcttgtcattgtaaatatttaaatattaaaatctctaaagtgaaatggtaaaagtcataaaaggttgatattgcaaaagtacataaggagatgaattaaacaagatcttcacatgactatatttcattatttcttagtcattaatcacaaataatagtcaaacatataataaattcataaatagtgtcaaaatttaaagtctaacaagtaaaaaaaaacggcgggatatgaataaatataacgtattagaccgtaatatatataaagaatatgtcaatatgtgtatggataacttattcttcaatttgcggatcatgtaaatttacaaatacttttcagaaaaaaatgtaattttactaataatttgaacatttaaatcgtatattaatatatatatattaatgtaaattttctcgatgtcaaaaaaaaatatttaattgaaaaatccttgttatgtattactcgatttataaaccatcttttcatttattagaccaactatagttctaacaattagtgacacatgttaatggtatggccacctaacttaacatctagcaaaacatatgtgagatgcataacacttgtcaattaaagcaacacaacatgcatggattatatgtacaaaactaaagcaattctccttgagtggtgcaatcactttacaaaatattttttttttttggtgaaataagaggggaaaccccatacagcacgaggctaagaaagcagaaaactacaagctagaaagaacaacaaaacaaaagcaacaaaagcacaacaaaaaccagttcacaacaaaaataaagaaaacaaacacaccaaacaaccccacccaccctattaaggggggcgtccatctaagccaccttccctcaagcacgggatccatctcggcctcgctacgccccctaggtcctccaataaaacagcatgaaggtcattcgggaccgcctctaacaggacaaacttctcttgcaaagtcaccccaaaattcgcgagccaatctgcagcacgattcgcttcacgaaaacaatgcgtgactttaacttcccaatccgtacgggaaatcaaggccatacattttcggataagatgaatataaggagagctagatggaagctcaccatctagcaaacgaaccacaacttcagaatcaacttccacatggacctttctatgaccacctctccaagccaccaccaaaccacggagaacagctaaaagttctgctctcgtgcacgagcagctcccacaattcagtgcaaatacttcaaatagttcccctctatgtcccctaattaaaccaccagctcccgcaggtcccgggttccctttggatgctccatctgtatttagctttacccaccccacgccgagatgataccacctaatatacctttcgcacctatctggacgttgactgctatggggatcttcatgtctcttcatagctagatcaatttgtctcacgcgagcagataagaagctgatttggtccacgggtattcgaggagtagattgaaaactcctatcatttctccacttccatagccaccaacaagtgactgaaaacattctactccacgattcctcattatccattaatttacctcgaaggttcaaagttaaccactcctttaactgccctttccattgtatttcttcagtgagaacacccaactgacgccaaatcagtcgtgcaaccggacagtcccgaaggatgtgtattgtactttcttcaacttccccgcaagcaaaacatataggatcatccgtgagctttctaatgaacctatttccattcgacatgatacggtcttggtaactaagccacataacgaatctgattctttgatcactttacaaaatatgagtatatgaggtaattaatcctcaacagtagcttccacgacaaactaaagttcaattattctcatcacaaagtaaacgaagatacgtatttactgttccttgtttggaattacaaaaaccagacaattaagcgtagtacaaccactactatttgcttaaagatatgcattaaaacgtgcattgaattattcttcaaagttacggatggcattccacgccccgcaacgtggctgggctgcggcagtgggctgggctccctgcgctggcccaacggaagctgaagataacataaggcgtctggtgggtcaaacgagcttcaaatgggctcaaattctggggtccgtcatattttgggccaatgaagataatggtcgagccagattttcagtttaaggcccaaaaccaggtcatggtgcacgggtattctcgatggtaccgaaagcttctagaaggggattgaactttgacaaggcttgacgacttgggattatatattcatgtcaagactaggataggaattagcatttaagaaaaatcttcaaacatctcccagcaaggcattgaacctccacaattgtaggattggtgagaagtagtgcttgcttcataactccatgtcttgtagtgcttgcttgctcctttagtatgaggagtagtctatccattaaatttgctccctcaccccacatcttggccccacgatgaaacttctcaattgttactatgattggattaacttgaacaagatccatgatatagaaacgtataaaagtgcacaaacaattagcttcaagcttgcactgtagctatcaaaggttgcaacggtatgttcctcagtcaactcctctattaccccatgttcttctccaatctctttctctaccaaagcgtggtaggagttggttaaattgaccaaggtctttaattagccagtaccaaagatggttttgcggcacatctctaaacatatgcatcccatcatccaatttgtgcactataaaagacaataatggcaatggttgataatcatttgccattatgaaatatgcaacaagtctagatgttcaagtggcatcatttcgttgtcgaggctcctcttccatcatagaggtgagaatcgtcataccttcaacaaaattttctatcttaatccctatttctcttgattcaatccatgggaggagaacgttctttggaaccctcaagattgaatctagggatggtccttactacacctctagtggctactctaattctctcactatacttggagcctagtaagtacaacaatccatataatatcccattatgttggttaggatataaatggttccagaacattcccaaattgcccttatcgaaaagcatggacagttattctaccgcaatatccacaatatccaagtaagagtgctcatgatcttcagctagtatgtaaagggataagcagaggaaacatctttcggcattcattttctttggaatatgcaattggtgcactatgttatcaactgtaaacaatcaacaataacttaatttggaaatcatcatacgaggtttttttttttgacgtgcatcatgcgaggttaaatgtatatatgttcctaataacttcattcaacaagcttatcaagtgtaaatattcgaaattcaggaaatatataaatatataatccaaaatgtataaagaacttggtcttattacctacccttacatatatatttatatatgatgttagttaatatttatctacactgtgtttaattttagctcaagtaactcaaactagacaaacaaaactcaaataaattcagttatcacagatagatttcaatgaatactatgaaataatgtaaatagattttcatcaagctgattgatctttctgattagttagcatacttgtgaagaattaatgatcaattacttcaaacttctacagaacctctgatgcacaacaagagaattacaattgatgagttccttatgatgttttatttgaaaaatatatgaaaaatttcgaacgaatccccaatgttttcgaaaatctgaaattgaaaattttcggtccgtttctggaccaaaatatctaaaaactaaaatatcggatcggatcgaccgagacatggaacggattggctggatcagatatttatgaacaccctaagtcgtgacattttccccactaaaactcttgacgttttcgtcaaaaacgtctttcgaattctgcagtcttgtcccactaaaactcttgaacatttttatggtatatcattattcacatgcatatctataagaaaacacatctttagataattcaagtttcagcctcgggtagagatggatctggacagggtcttctaagatctagatctagatccgttttttacgcaaggatccaaatcctacccggatccattgggtaataagaaagaggatatggatcatacggatccaaaacggatccatgcctattttcttcaaactacccaataaaataatctaatatcaaccaaaatttacatttaatttctaaaaaaaccattgctaccatttacaactatttaattatcaaactatagattaatcaactatttttgaaagattaacaattatcaattgatttttcgaaaccaattatccaataaattacattcattagaacaataattcgaaatttaagcaaaaatatactattatacgtaataactaatattataatattaaataataataatattgtaaaaacgagtaaacgaatctggataataattcgggacccggtccagatccgtttttaaaggaagatccatatcctacccggatccatagggtccaaaatttaaggatccagatccattacccattgccatctctagctcgggtaaccaactggttaaaatataaaaataaactagagttgtatcacatttaaaaaattatctttaaggtcttaaattgcaataaaaaaaacaaggaaaatttcctcaagtacccttgaggtttgacgtaattctcaaattagttagtttttctctttctctcttccattttctctatctcccccaatcctccattaatgaacctttaagcttcaaatctttctctctcctcctaattttcctctttatcttctgtgtcctcttacctccaatcttcataatgggtctgacccgacccgttagtcaacacccttgacacaactcgttagtcaacacccttgaattgacccggcccgaccctgaccctgtccggcccggccctgaccctgaccgacccgaccctgaccctgcccaatgaacaagagtttaagtgagaagatataaattaagttatagttttgcgaaaacactatcctaaatccctaataataagattcatgacttatcttttaatttttcgaaaaagcaaaaaataatcaaaatggagtagtggaatcatggactagaattatgcaagtacccctcaaaaaaaaaaaaaaaaaaaaaaagtaatgccaaaatcgcacggccaaaaacggtttgtattccaaaagttcgtactacacactctacaaacgtttctgacagagcctactactgcaactcctcccacttcctccatctttcctccatctttggaaacttttatctctctccttcacttctcaacttcattctaggttttcactcattattttctccacagtattgctgcaatctcagtaacattttccttcctaaatcatgatattttttttttatattttccgtatagttaatgctgtaaggccattaattgctcttgcttgcttcttcgtgaattatctgcaattttatctacttcttatttttcgttatttttgtatttttcagttcgtttctcatctatctttatctttgtgtttttagtttttttttttaattatgtgcagagtaatttaatctctgttttttctttgctatttgaatttttgtttatcatctagttttggtttgttgtttggattaaaatgcttaattgaacttttgaaggatttttttgacaaattttccttttttttatcatgtaattttttccatctctgttttctctcgccatccttatttggaggaatttcttcttttttagtttttttctgttctagttcatttgactttaaatctcgtagtttattgtaggtaaattctaagtattatgttctggtgattgtcatagtatgagggtttcatcgagaatgttcagcatactattctgtttgcttaattagttccttactattattgatctctcatttcgccttaagtatataaatttttagaatcaatgatgttggcttgttcttataggaatttttttttggctaagtgggaaagcaacaattttcggtttatcattaggtttccgaaatcacgtaataatgttgctatttatcaatgtaaaagggaatttgcgtgcctctactatcacaagtcacagttttcttcttccattaggatgctactcccttagtgtataactttttccttgtgtgtcttttggaaattatctttctattggtgtagaaaggttagagctaaactcaactgtttttttattcatttttgataatgttaacaagtagactctttccagaccaattgtttccgtgtatatgtttacatgtaaattctaacatacaactgaaatttatggcttaagactctcttgtatcaaaatttgatgcttgactcttgttggctctttacactagtgtttgctggattctcatttggctttagctacctgtttgtgtgtttttctttcttatggcattatggctggtgtatgttactcaagattagcttggtatatgacatagagctgatttcataacaatttttgactttgcagccatctgcggaagtaaatggcatcttcagatgaagagggtgaggtatatccagatagcgtgactgattatgaattcgtcaatcaggagaatgaacacatttcatttgcatttttgccccttcaatggcgcaatgacgagtctattgacactgtaaacctccagatgtttatatctggtgtttgtgatggtggccttcaaaagatctataaacaagtcgtagcatggagatatgagcttgcgtatgtacagccggaaatttcggtgttgtgcaagggtaacctctgggtaaagcttttgaagccgaaaaagctgtttgaggctacaattaggtcaatactgatcacgatacaatgccttcatttcgttaaacataatccacaggcaactaaaaactctatatggtgccacttatcaagagttttcaggtttgaatgttgtctttggtattactatctggttttgcaatatgtattgatcataacattacataatgtatccactatcaattatctcactatcaattatcccactatcaattatcatgtactttgaataaattatatctacctgcaattattgcagcatatatgaggtttccccttcagaatttgactgtatggatcatatatcactgattaaaagtgctgctaaacgtgacaaaaccttcatgaataacgaggtatttgctctttaaatcctacttctcctgagatgacttgaattgcttgcatgttcatcattagtatacctaagaaattgattgtattcatattacttaagccatagattgcactcggctgagatggactgcgtttaggttgtttgatctgttctcatctataatactcttaggctttacactttgatgtgtagtcaacatgaattattattggagcttaatctttgaggattttgagctgataagaaatttatattcttgtgctgtttatgtaggattcaatagtgtgcttagacatgtatgcataaagtagatggacatgcttatgctacttgtgtcttgctagcttgccatacaaagagggtagacttgatgtacaataaagaaattttttcttcaaattatttaccaaataaccccgagttttcggtttgttcaccaaataccccgaatgttttgaaaattcatcatgtaccctgatctttcaaaagtacactcgcataactaatgattgtcaactccgttaacaataacacctaattagccaaatgaacccacttataagaaactaagtgcccaatccttttctgcaaactctactaagaataagaataatcactattgcctagcaatttaaaggaatttaacagtacatatgtaaacatgagtaacttagtcgacacttttgtcatatgtgtagattggattattcatgatagatgcgcgttgttcttgaagaatttgatagtattgtgtgctctctttgttcccaaattttctctactaagagtattcataagaagtagaataaaagatttggaagtgaataaagagaaaagaagtaagagaaactgttggtatggagagagaaatctctattatatatgggagctcttgaggactttcgtgtctatccttttttaccaatatgccctcaactagaaaataaaatcacaacacctactactctattagtttaaaaacaaaaacaaagaagggaaaaattgtcaaacaaactgcaaagcaactactccctctatctcagaatactcttggcacttatcaagacacgtagatttagatgataagttgttgtttggttatcaattgttattttattgaaaattagatgtgataggagttagtaattagtaaaagtagtattactctattttaaggagagagaatgtgagccatggttaaagttggtaggtaataagagtggtattattttatttggaggagagggagtgtgggtcaaaagttaaaaagtagaatgattaaaataatagtgggtcatatctcagaatagaagtataaagagtattatgaaacaaataaaaaaaggaaagtgtaaagagtattatgagatggagggagtagtacttatccttcgactttataacgtgcatataaggctagtaggatgtaatgtaacggagggataagaatgaactttttttaatcaggttgttttcttcaacctatagtagaagtgaacaaaacccttagacaactcgaaaaggaaagtgtgaagaaaggttagatgaagggagtaattattagatccaactgttgggagttaggactacatgaggggaagcacatttgtttcagtactcttttagtgttctattaattttttctttcgaggatttcatagtttgtgtacttgtgcttatcatgatctctcttgtatgaataagatggcgttataagtttctattcgggctttaggagtcattcatgtcattaggatatttccaaatttcaataatatctgtaacaaatgaatttcataagtggacttaatctcgcctaaagagacaaactatgtatatcttgacatttatgttgtgtgatatgcttttatttctaattgattaatatacatcccgtcctatatatgtgtttataagatagaaattctcttgttttaacaacgaattccttggacagtacattcttgggattctattggaaaagcctacaaaggggaaagtgcttcaaatggtcagttcaggatgttgatttttgattattgttctaatgtagtatgtataatggattaaaattatgatttacctttgtctaccaggaaggttcgatggtgaagagggatgacttcattgtggatgatcctgatgagcttgatgattcatctgacaatgatgacctctttgatacatgttgctcactttgtgacaatgggggggatattctttggtatttacttctcttgcttactccaactttctatttctatatgtttgattgcttaggccgtaagtggatcgagaaaggcccgattagaccaaaaaaagtttggattggatttggaccaaaaatttttattccaaaaaatttcagattggatctaatcttgtgtccaacatttttgtgtacactgatttcacttggtgtcgggaatgctcgacttatcaatttatctgctcatgttgcccatgctggattaattgtatgagcaatgaacctatttgaagtggctcatttcgtaccagagaagccgatgtatgaacaaggactaattttaccccccaacctagctaatatatagtccgtgaaaagaaatagaatcaaacatagaaatagaaattttaattcaagttccaacaagcgataaagaaatgactccaaaaaagttggattgttaagaacttcatattcaaggatacatgtctcctaggttgcatgttctttacatttggaactacattaagatgagagttactccttccgtttttattttttttatttttttatttttttataagaaaagaaaacctaggtctggcaccttggataggaccagcctacaccatccttacggatgatgaaagaaaaggcaatattagaagaggaaaaacaatacacaagcaaagaaacctcatgctagaccgtttctttttaatctacacactttcctttttagtctttaatctacacattgttgctttttctatttttgttaacatatcacttctactttctcctctttttctacccatgtcattcactttttaatattttaatccactcttttgtttctctctctcacttttcaatttctctctccaccttttcggtttctctctcatacttttgtacttcttcattggttttcccccaaagtgaagtgagtaaattaaaaagaaacggagggagtattacttatgtgatgatatgtttttaatttatctctaatacattatttgatttagaaaaatcagttgtaccaaaatggatttaacttttagagaaatggcctaaactggataattaattaatttgaaattttggacaggaccggactgagactaaattggactagactcgtgatgtgttctgactagttatagactcaatttatcgagtccaaaaaactttagactggatttagaccagtccaattcgtcctccttctgattgttgttctgcctctacattttcacataaaagttcagagtgtactaagttaatacaatgttgtttatgacaaattgttactgggttccttatataataatagtgatatttactattataggtgttccaaaaaaatatagctcccttgttcttctagtttattataactggattctccttcatccctcacttgataatgaaatagacacaaattcttctacagtcattataaatcttatatgtttgaagggaggagacataacatgccaatgtttttgtctgacctgtacaagaaacgttaggtgtgcaattgttctcaattcattgagctggtagtgacaagtgagcggaggggtggggtgtcaggtaaccagaagattgtattgtcaaaaatgtaaaggcgtctttttggtagagtaaaactcaatttttggagtgcttctgtttattctacttgctggggaaagctgttttgatcttcactgtttgctttgaactatgtagttctattacacacaaacttgtcattcagttggtcacgccttcctctcctgcctggatgtgcctcatctgaaatgacacaggcaaatcattggggtacttggggtaattgttgaatctagcatgaagatgtatgttcgcctttcaatatctgaccaactgtttactgttttcccatttgatgtcttgcattttgacagttgtgaagggaggtgtatgaggtccttccatgcaactgaggcttctggagagggattgtgtgatagtcttggcctatcggcagcacaagttaatgtaggtaacattctcctacataaggtttatactttatatgtactatgcataacaatttgcatttgtcttgattattgttttttacaggctattccgaattttatctgcaagaactgtcaatatcagcaacatcagtgttttatttgtggaaagttgggctcatcagacatgtcttctagcccagaggtataccctgttaaaaattttacgagatccttttgtcccctctttggtctattgccttgtctttgttttagtatccctttcgtattttttcctttttaccattgagcttttaattgtttcatggttatcctcaactattcattgtacccgagtgctttgtgtaagaagcagcaagactgaataggatttataaagtgttctgccaaaggatatgtggagggtcaaataaacatcatggcacattttttttttaaaagtaatggatgctaccaaagtgttgaaaagttagtctccatgaagaagtaacaatcctagatagtaagattgctagcaagatgcttatgtggaacagatttttttttttctcaattataattgataaaactgaagtataattacaagttgcgtgtcttgcacttcaaatttccagtggatcaatcatgtgtctgtcctgctcagttcgtgtaatatccccgcagctgctgtaactttaaaatgccacttgatgaaggctggatagacattagtgctagagtgctcttctggtaggctttcagtctcatgttagagtgcattagcgtataaagaatttagagaatggggatctgaactatgattcttttttttttgaaaaaaatttgtttcgtgcaactttgtgctgtgcagtctagtttatctgacatgacttctttcaggtcttcccttgtgttgctgctaattgtggccggttttatcatcccagatgtgtttccaaaaaactccagcagcaaaatgatacccagatggaggaccttgagaagaaaatatttgctcaagactcttttgtttgtccttctcataaatgttttgtttgtaagcaagcagaggatagagaagttgatgacctacaatttgcagtctgtagacgttgtcctaaatcatatcataggaaatgcttaccaaggtaatcaatcttgaatgattgcttcattgtgtatcaaaattcgaacttaatggatgctagactttcgatcacttctgcagtgaaatttcttttgatgataacgctgaggtgaatggagtcttgcaaagagcttgggatggtcttctgataaagcgtatcttgatatattgcctgtaggttatttatttattgcttttattgcataattttacatctgaactttggttctgatttcatgcgtctgtttggatttgctccggactttgcacagggaccatgagattgatccagaacttggaaccccgcttagaaaccatataaactttcctggtgttttcaaagagaaaaaacatgttccagaaaaacctttgactagagttaatgtcttaccgatgaaaaggaaactgattccttatcattctgcaactgaaactgttgaaaagaggactgtcaaacaagttgataaggtccaaaatagtatcagaggtagtgattcaactaggttagttggacaacgtggtagtaaacctagttctgttgctcagaagagtgaaaggtttagtaatttgtcatttgctttgacgggtcatgtgaaatcttttccaaagcctcatgctttgacgacaatgacagcaattaaagcagttcctgatagtaaagtcaattctgagaaaaatctgaagtcaaatatagtgcactctggcaatgctgacaaatattggaagaaacccagtgctgttcaaacagcaaagcctttggtagagaaacaaaggtgctcaagtcctgtcattgatgtcacaatgcagagaaggtgaggtttagccctaatggtgttactatctacttttggtaccacaaaatatttatgtcatttcttctgcagaataatggctctgatggaaaatgtcaactcttcatttgatgtggacgagttcaagaagcagcatattgttccctccaattataaaaataatcaaaatatagacaagaccctgacaaaggtgaaagttgaggtcacagttaaggtattatgtttatgtctggactttttgaaattgcttgctgcttcaaatgttttaactgtgtcaagaattcaagatatttgctggccttttgactattctctccccccattaattgttgcaaggccattcgaacagccttgcagaagctcgatgatggtggcactgttgatgatgcaaagagtgtctgtagtgcagagatgctccgacagatcccattgtggaaggtttgaactatactactttcttttatatcaataatgcttgtgtacataatgagttaaggactattggccaaaatgccatttccagaaattagaggcgagagctatatgtttttggtatattgtgtaattcaacaatattctgatattattttctatcacgggcaaaagaaaaattcaacagaattactgtcatttgtaactcaaggactggcactggaactcgttgatgctactctattccttcccatttggcaatgttggacaaagtaatgggtaagataggctgctgatatgataattttcgctctgcaggtgaagtggggtaggctgtggatatgataaataagccttgtataggagatcctaaaattaatgttgaagacttttaatcacatgaaaattttgtatattgccctgtcttttgctagaaaaataagtcattcagtccagaactgttgtttaattcaatgggtttaatttacaaggagtaagtattgtaatggctcttaagaagccataaatagtccacttgtatggtttccgtgtatgatggtgggtaattacgggaatggaattctgccctttgttaatgtgagaagtatgtattctgtaggttaaaaagtttgaagttcagatgaatatgtatggggaaacctcccctgcagctgcctaatctattgtcatattcctctgaaatttttgcacaccttgttcctgattattagtttggttgtcctcttactggcttagtggttctgtatatatcttcatcttctaagcaaccgtcggatagagccttatggaattaaatgggctgcttaataccttgtcttcttttcgaataaagtaaagttcttcatgctattgaagcactttaattgattatattgttgcagaaaaggcttgatgtgtatctcgcacccttcttacatggcatgtcctactcatcctatggacggcattttactaaaccagataagcttcaggaggcaagttctgcttggattctattatataatatatcttcttgtttatttttaagaaacagtaggtgaactgattgctaatttaatgcaaaaatcatgaagtgaggaaatgaataatgatgttgaatctgtgctgttatgcatataattttgtatgaatgtgctaaatgaacatacatgatcatgtatctctaatacatagtatgtttatttttctttaatgattgtattagtctgaacttttgacttctatatccaatgttcgggagtgttcataggtttctgtggcaactttatgttgctttacatcctggtgacaagtaatacttctggccgttgtaatcctttgaaaattgatgttcaatacctctagtctatgctagactgttatctacctgagatttagcactgaaatcgctgaaaattgaaggtcattgcaactagatcaccaggccttgtttttgatgcacttgttttattttattttccctagtgaaactacttgcagctgcaaccacaagataccacttcaaatataatcaatcattcacattgatggcaataacttaattagttggctctttggacgtgagtgcctaagccatattttgggatcattaggtggatatcatcaatatcccctctttgattacaatttgtggttgagtgtccatgaggactgtggagtctgtttttctaatgtagaatttgaagctcaggtgtcgtttctgagcttcattcttttaggcacagttctcttcctccttgtacccaacctggcagctcgtttagtcgcagtttggcttcagtggaaagtttttccttgtggtagtgtttgacaatatttttcttaggacgctctctcttctctaatatgcatgataaattagtatgatgcatctattagaatattctggaaatgaaaaagagaaaaatcattgctgggcatcctggccgtttactactcgaaatcctactgtcgctgatgcctggtccttgtcactgtttttgttttttgggggatgccgcatggatgttgatggtattgcttatcatgtaaaagcataatactcactcctttttttgctacatcttccatagatggatatctccttttacttgctatatttctttatttggtaatcatggcccaaaaaaaggtaccaaaattccctcttatttctttgtcttcttacctataactcccaaatatttgtcaattttcccataaagttatggtccacaccacattttttggttgtcctaaatacttgtgccacaacaatatagcaagtaattaaagacggaggaagcatttagttaacgtgtaccctttctccctgttcaaaaaagaaaaaattataataactaactcgcacattatcaataatagtattagacatagagttgagcctacagataaatggagctgatggttgtatttttttcagattgttcaaaggcttcattggtacgtccaggatggcgatatggtgagagctttttcttcagtctatcgccttcttttattagtattggagttccaaatgatacaaaatatgcaaagaatgttgcagcagctcttttttatgttttatgtatttagggtaaagttaaaccacctccgaaaataatttcttaagctagattaggcaaactttctggatattcaggtaattggtagatcatgttacaatagtttttaacgtcactaagctatgaactgctgatgatgttgcagatagtggacttctgttgtggttctaatgatttcagctgtttgatgaaaaagaagatggacagcgtggggaagaagtgcctattcagaaattacgatctctttccagctaaggtggactttgatttctcatctcataattgcatctttgatatattgttcttttggtatttggaccaatatagtaagttacagacctaacatatccagatcagtgttacctggaggctgcacatgactttactggtactatagaaatcaaattttttaaagaagtaaaagtatatgatttgtgtttaaaagtttgtaattttcaaacgttagagagttaatgttaccttaataatcgatccttatttcatggacttttttcttgtgaccaactgaccaacaatgagaccggatcgactagacttagatgtctacttgtagttttgctgtgacttgttcgttttttttttcaaaaaaatgtcaaaactcgtttatattttttaaatgctgcgtgtttttgtggttagaattaagaccatattctgtgtccataattattagaattagctttctggacacttttgaataatgaatacttttgaagaagaaacagaaatcagaaagcaaacttttcgcagaagtcgattcgtcaaaaggctgaggggtatctgcctagccggtgtcttgccaaaatagatgagaaggattttttttcctgtttttcatccccttataagttaaatcttacatctatttctcaattttagttgtttttatctttttctccgtttcaacttatttctgtaccttttcttttaatagagtaagatgtgttctcaattctatgcaatgaaatcagattaacagtttttataactatatcatctaaaagttaggataatctcttcttaaaaaatgtcagcttgtgtgcatcctgtgcatgccctggctccagtgtcccaaaccctttgtggcttggaggtcctcatcctcttcaaaacaaaaaataattggttttccgctgaacaaaagtgtctcataatgtaaaatgcaacatgcatgaggtgatgatgccttgcatggcgttattttcttacaagggttaccttggtcgagaaaagtgcctgttaaattgttattttaccttttaactttttcccttctgcgtgttctgtgccttgtctgttttcgacttcatgatctttgccttgactcttgttgaaccccagctttacaaggtctataatgaactgaacaatggactttggatggtaggctttggacctctcaatatcttagactgttttatactttggaccactcaaacttttgtgcttgaggtggatgatggaggtggggtccttggctccttggcatcgtactgatctggcaaaactatggccatgtgctgaatagtttatgtgtatcctggaaatacgcactcacttaagttttgaaacaaggtgaaggttttctttggctagaccccccactatatgaatttttttttaggggaaaagcaagctagattagggacagtttgttcagtttgtccataagtacataggacgccacctccggaggggagtggttttcccaaatttgttcaacacaaaaggctactagctttgctaaatggtgggcaacatagttcccgtctcttttaacatgagaccaaccaagagacttaaaagacaatgagctaaaatatcaaaaagaataacatctaactccgagaggaaaacagcattttttgagagacggttgataacaacctgacaatctgaaacaaggtgaaggtttgcattggctagacctccactatatgaatagaaaggagaagagcaagctttcccattgtattcacctataaagtaatgggttttaaagggggcgagcttacgtgccaggcctttctctgcctgataactagtatcgctgcctctccccaaaaaatcatcatttcttttaagaaagttgagaaatccgcaattcgaagatcgacgctcgggtaaagacaatgagtggctatggtaggaggcgtcccaaaggtaattaagtcgctataacagcagtaagtgattaattttgtgaatcagttgagaaaggatactttagtaatttctggtagaagcttcttaagaatcttgctagggaagcagccgggaacaatctagggcctaaaaatatcaatatgtatattgttctagaaattatggagagaagaaatagttaggagagagttcacctgtcacctcccgggtatgaaatattttattctcctaatattagcaatacaaatctatcctcttcgcctaatttttgccttttctcttgattcaatgtgttaacttaggagttcatagcaactatgttttaaagaatacttaaattatggttgttgatattgcaagttgagaaacaaatgattgaacaaaaataatttctgtacaagctatatgtttctcagagagcaattgatcatgtttagcagcacataaagggattttatgatatatataactgattggtggtagaggggttttcaaatccatgtttagagtggtaactgttatcttatcaggttacacttttatagctgtctggagtacaaaatttgtggtcggtatctctttttatagtcctggatttcatgagcaaatctcaaattggagaataatatcgtctttgggttcccttaatggggactttatatctatgtatatttttttttcatttgttaagggatctttgtaatttacagattcagcatatgaagtttggaaggcatggggggaggggataacatttaatgaaaagcttttgccactacgtgtgtgcttttgttggagaagctagttagtattttccatggttaggactccggagtcttctttgatgaattagtggtgttttaatcttctctttgggctcatgctctagctacattatagtacgtttttttgttcgcacaattgctttttatttgttcttttgctgttggagaaaatttgttttcttatattgtaattcacacgagttagctgtaccctattttagcactgggaaacgtgactgtcatgagtgtttttgtgcatctaaggccgtaccatagaatgatataagtgctactataggtattactatctcagtatttctttagcttcatcctcgttagtggcaaaggaatagattattttagtaagtacattcaaccaacaccatttttttcacccaaatagtatcccctttgaaaattattgatgctgcagttttgccaattagtgctcaagttttgtctttcatgatatttatgattaataccttttgtttgttatctcaaatcttaaattttgaactagatatgagaggagtttgtacatgttacctctcaaaatgtagtgtcaaagccatcatataaggtattcagtggacctagcgggatcttatgggtatctattaaggttttttagctgaacttgtctcttagtttattggcttcctgtgtaagagggaagcattgaaggatagtaatgttcttagctgggtcacaaacatgacaaagccaggtcacttagtttgtcacacatctcactcactaatcactatgcacgattggaggttctccaatctccaaggtttcatgcctatctagtgctttttatctgttgcgatattcatatactgttggctgatcattatccaacatgcagaatgatttcaattttgagcaaagggattggtttagtgttcatcccaaagaactggcagaaggttctcgactggtgagattctcgtttctgaagggtctcaatttacttcctctctcgtcattcttcatttaacttcttgtgccttgattcttattcttttggctagatcatggggctgaatcccccttttggttgcaaagcatcactggctaaccaatttatcagcaaggcccttcaatttaaaccaaagcttctcattcttattgttccgccggaagctcacaggtatggacataagttttctcttgtcattgattttcaccttgaactatggagtatcattctttgtttttattattaatttgatttgttgctgtaggcttgactctaggactgacaagaggtacgacttactatgggaggatccgcatcttctctctggcgaggtacatagtgacatagcttcctatttctgacccaatttctttctcaaatctgacttgttatgtatctgattggttatctttcagtcattttacctaccaggatcttgtggcactgatgagaagcaactttcacagtggaacaagattactcctcccctgtatctttggagtcgccctgactggactcggaagcacagggagatagctaacagttgcggccagctccagcttcctggtgaattctctcagccacctacttggaactatctacttgaagagcagcacgattgttatgatgatttttccaatttgattaatatgtatgacaatcttccttccatgttagatgacgttcctgatgttaatgataaggtttgactcatgtcaaactctatcatattgttagtaaacgcttagtattagttgtatttatctgaaaattctactgtgctcctaggagcacgttgtataccttgtacggttgtacctagtaaattcgttccagttgcgatgagtaaatgttctatttcaacacatgttcattttaagcatatttttcaacaaaaaaatatgttctatttccaataagcaaatgttctatgttgacaaatgttcgttttaagcttattttccagtcgaaaattatgttctatttttcgtgaaaattgttctattttcgatcagtaaatgttctattttaaaatatgttattttacttattttccaccaaaaactatgttctattttccctaaaaatatgttctaaatttcataagcatatgttctatttaagtaattgaattatagtaatgtttcacttcaacaataaaatgttcattttcgtaattggattatggtaatgttccacttcaacagttaaatgttctttttcgtgaatgaattctagtaattttccatttcaacagtaaaatgttcgttttcataagtgaatttttgtaatgttccatttcaatagtaaaatattcgtaaatgttctattttatactgtgggagcacagttctcattgtgctcatgggagcacacattagtacttatcttcttcaattacaatacttgatatcttagctagatatattccttatttttatccttgtatagttgacttattcctttgtaatctatagtttcttttgtactccattgttcttcttcatgtactataaatgccacagcaacatcaattgtaattagggatatgcaaagatcagggtcggattgaaatctgaatcggaccataccggaatttggactggtgcagagaaaattccgattttgggttttcgttccaatcttgtccaaatctggaaatttttggtccgtacggatgaatcgtaaattttgatcttttagtaaaaaaaaaaagtatataaattaaaaaagtttaaaaagtataaagttaaaaacctatcatttattacctttaggaatattgctattaaaattattaaatatttatttatctaatttataaatatgttttttaacagataatttataaatatgtttaaatcaaataaaaaagtttttttttttttacaaaaatatagattccgatccaacaaatccaaaatcgaaccggatcggaatttttttggtccagaccaaaccaaaaaaattccagattccgatccaccagtgcaagatcggaccagacgactccaatttctctccaacactactgaaccttccaagccccttactattatgaatgctcattccattcaaaagcttacctcctttaacgagaggtgtcaattcagttcaacgttgagtattggttatatccaaacatttcaattcatatcagttcagtttacaacagttaaaattataaataattcagttaacaacttttcagttcagtttaatttagttaattttcttctagtttcaattcagttcagttgcagttttaaccagtttcaatccaaacagttaaaccaacgaacggttgaatccatagcagttaaaacacactgtagtatttttcagttttatttcagtttatttcaattattggtgaaaattacataaattcaacaataatcgcatcggttcgggtagaagttagtcacattcttgtatttgttcgggaaaactgaaacttcaagttgggttttggccaaacattttttcggattcgtttaaaattaaagtggcaaataagtacagtccgaaacttgcctcgaaaaaaaaagtggttggacttcccatacatgtgtatggaattgacatccatatatatgcactttactaatatattcgacaatttgggataagacaattttataaaagtaaatgatcaaacttttattagtatgcaaacaacatcatgtttggttaaaaaggaagtctcgtatcagtataaattcttataaactcactcgaaatacgagtcaaacttttttttaaaagtcgattagatcaatatcttactataactatattagatcaatgaattaatataactgtttatgccaaattctgatcaggcagaacttagctgaggatctacaactaatgcaaatacagctagaaatgacaagaggaactagctgcggaatttaaagaagaggcaaagaaaagacaaagacaccaagaaatggtgacgcggaaaaccccggaagagggtaaaaaccgcgggtggaattgagtccaccaatccactatatgagaagattacaacttatagctagcagctagcgacttcgtagcttatactaaatacacttgagaatattgtaattgtagaagagagaaagaatgtaagtaagagcaatgtaaagacttatgttttacggagtgtcttcccttctatttatactaatacatttgtataacgttattccttatttgaacattgcataactaactttcctatgaaggtgccacaactcctacaatcaagggagatcttctcttctactggctaaccactttctcctatttctttggcccaacgtcattgcttgacttggtcttagttggcatccgatgttcttccaaccggattataatcattcttcatctctcgcttctttgtagttgctaccgatgctctctagttgtgacaaacgcatttctgcaggttttcgacttaggaaaattttaggacataacaattgcccctaacttgtgatgccaacctaggcgtaggcgaaatataaaatcgcaagttaccaatcaaaacaaattgttagcaaaaggacttaagattaagataaacttatatttttcagatttttatcttttttcctgaggaattaaaacgtttgaagataaaaacttttacttaggagataaactcttttaaccgctaaaaagataattttcttgggagaagataaactcatcaggtaattgattacttatcaacagctaaaagataaattttacgcaacattaaatacttatccgttggcttagactaccgttgagctaccagtatttaaggaactttcacccttttctgaagcttcacttcactcttttgcgaactcctcttcttctcaggtaaaacttctttctctcgttttcttcctcaggaattttttagatcttttcttcttctctaatgggtagagctatagatgacgtcgcttcgtctgtcactgagcgagatatagaggtgctcaaagttctggggggtttccctgaaaacactcagattatcctccccacccccacatgcaggcccgaaacctgcccggaagattacatttgctactatgagcatcctttctatctaaggtataattacgcattttcccccctcactaggtcctttatggaggttttgcacctatccccaagccggtgatgccgcctttttagaaaacctgcttgactctagagaccttaactaaaacatggcacaaccccttctctctaaacgagcttttgaccgcctacaggtgttagaaaatcgggcaagggtttcattacttttagggctaaggctcccttccccctttaatagaaggcacaattgcatccgattccatatggaagactaggtatttcttcgtagtgaaagattcgggcgggcgaagctgggagccctctgttgggggttggtctactaaaggtacttatctgttcaatttgcgctttgctcctaaaaatgaattaactaggttcttaccttgtttcccttgcaggtcttggccccattgtctcccagatacccgagcaagctgagagactactagaactgcttaatttccccattgaggaacgcaccttcacagctcgtactgaggttctacccctagactctaaggcttcttctcgcaccaactcgatgtcaacaggtaattttagtttgtgaaggttctgttttgcttatgattcttagacattaggtcaactaggttttccttattcatacagctccagcaagatctagcaatttgtccgacgaggacgctatggacaggctgaagaataggaagagattagccgcctcttctgggcaatctcaggttgagagggttcctcgcaagcacatacgctcatccaccatcccaactactatcgacatcacgactgactctcctagagatgaagtccttgtgagcttccctgcagacttcctaggcgaggaaggtctagaaggtgggatctcggcctgcaatgataagctcgtgtttccagctgcacaaaagaggttaaaaggacaagaccctgaggttgtcttgaaccatgctgttcagctatccctacaggttagtaacgctttatgatttattccatactatgaatactattgttgctgcttatacttacgcttttctttgatacgccagctttcccagagctgcatagctgccagggacagcttgcggactgtttccactcttcaagataaggtggctcgtctgcaaaaggacaacttgagccaccaagctaagcggagagggagaaacagtcccggttgaatgctgagagcgggttaggctggcagcaaaaactaattgaaaaagagaggctggagaaagatgagaagataggcgaggcggagaaagaaaatgcacgcccgactacacttgtcgagagatgcttgaggagagggttttagacattcaagccgaagctaaaattattgaaactatgaagctagcatacccgataaagttcaagaagtcggatgataagggtgtcaatttttacattgacgattcctcaagggactctatggtcgctgaccgggaggctctagctacagtggcaaggcaaacgacttcagagcgatctcaaactggatctcctcctttactcaaccagcccagaggtgttgctccaagtggcaaggacgaaaccgtcggtgatgatgccgcgtagcttcttagtttcttcaacactttatcagttttctttctggaacaatttagttttaatcaactttggtacttttaccattgtccatgggggaatgtgtttttgtaagaacatattttcttttagctatttaatcattggacttatgtttttgccttttgatcttagctgttgacactttgataaatacttatgttacatgcatgttttttgttcttagatattagaacaacttatttacctggtgtaagtgttgttaaacttaggttgggtccgtttccttggtgctacgaccattcagctaaattttggtgctctaacccttagctgctcaagctggtgctacgaccttgcagctggatcttgaaattccagctacccacctaggtgctgcgaccccttgcgtttacctgcgtatgaagtggacttagatggcttgctgttacgagcaataatcataaggtactcaatttgttgtttacctggcggaccaatgctttgtgcaaaacaatggttgcctttaaagattctggcgtctttggcccggtagtaacctggctaatgccccaggttagaaatgatatagcttaagatgagaagcgttccagcttctaggtactgtttttccatctttactagttaggcgataagctccttttccaactacttgatcaattagataggggccttcccagcttatccctaacttacctgcattgacctcttgtgtattttggaagactttccttagaacccaatctcctaccttgaataccttggctttgacattcttgttgaagctacgagccactatttgctgttgcgtagccatccgtattaatgcattatctcttaactcctcgatggaatctaggtcatagctaagctctttgtcgttggcttcagcagtcatcaatccatatctagctgtagggacagctatttcccagagtaacaccgcctcgcacccatacacgagtgagaaaggagttcttcccgtagcgcctcttggtgttgttctcgtttacccatagcaccttaggcggttcttacgcccattttcctttcttagctttcgggagccttttaatgccattgataattaccttattctttggactcggcttgtccgttagcttgcgggtatctaggcgtggaagttatcggtgatgttccattcgtgacgaaattgccttgtcttgtcacttatgaacgtgatccgttatcacaaacaatttcagctaggtacccgaatctgcagataatgttagtatgcaaaaaggatattacttctttatctctcacctttggaatgccctgacttcgatccatttggagaagtaatctgtgagtgctagcatgaaaactttttgccctggggctacaggtagtttccccacaatatccataccccacctcatgaaaggccagggtgtcaaggtgggatgcaatatctcagctggctgatatgtcatacctgcgtgtttacggcgactttcgcatttttgcacatacctcttagcatcgacgacgcatggttggccaataatacccgtatgctaggattttgttcgataggcttctcccagtgcatgagacccgcattcaccttcatggaattccttgagtgtgggctcccaccggtctttctccaagcatctttgtaataggtcatagctggcgcaagctcttttgaatagagtccctgaaataacatgatatcttgtggctttcattcgcagcttcctagcttccagcttatcttctggcaggatgcccctctctaggaaatcgatgattggctgggtccagctagcgtttctgctcgatcgctatctggccgcaccatgtttacctctttgctaatagtcggctcagctaggtgggctataggtattgactcgaaattgcatttcctgagtgctgatccgaggttagctagggcatcggccttggtattctggtccattgggatctgttttatgctgaactcttcgaataacttggctttgtctttagctagctctaggtaagaggccattttagaatctttagtcagtgtattctccatttactcggcttactattagcaacgaatcactcaagacatgcaaactgttagcttttaaatcatgcgctagtatcatacctgcaattaaggcctcatattcagcctcattgttggtagctttaaaatcgcagcagatagcacgtactatcatgtccccttgtggcgactttagcattatacctagaccatcccctctgaagtttgaggatccgtccacgcatgtttgccaggagcccgatttacctactttgttaatgtggcgcacctcttcttcttcacagtaggctataggtcatgtgcacttagggatatggcccatttggccattctccccgaatgctcgagttttcgtaacacttgctttgatggggtaattagtcataacatgaatggggtgagactcgaaatagtgtcttaacttacgagatgccatatataaagctaacactaatttttcaagtgatgtgtacctggtttcagcatctagcaaggatttgctaacgtaataaactgggagttgctgattttcagcttctctggttagtaccgcacttaccgctttgctgctaacagctagatacagctggagagtctctcctgtagatggcttcgatagtaggggaggttgagccagataagccttcagatcttgcaatgcagcttcatgctcatctgtccagttgaatcctttattcttttttagcacgttgtaaaacaggtggcatttgtcggatgatcttgatatgaatctgttcagcgcagctactctccctgtcagcttctggacctctttcagatttcgtggtgattgaatattgactagtgcttgcacttggctgggattggcttctattcctcgctgggtgactatgtaccccaaaaattttgctggcttgggacaccgaaggaacacttgctaggattaagcttcatcccatacttctttaagacttcgaaggtttctgcagtggtccacatggtcttcgctttctttgttttgaccaaagcatgtcgcctatatagacttccattgtgtcccccagctgcttctcgaacatcttgttgactagccgctggtaggtggcacccgcattttttagcccaaagggcattaccttatagcaatagatgtctctttcagtcatgaaggcggtcttttcttgatctgcaggatccattagtatctgattataacccgagtatgcatccggaagcttagcctctcatggccagctgtagcatccaccaatgcatccatatgtggcagcgggaatggatctttggggcacgccttattgaggtctgtaaaatcaatgcacactcgccatttgccccaatctgcacggtttgctctggcttcgctgggtccaacgccacttcatctacatcttggtttgctggcttggctggcgctggaccttgctgtaattgctagatagattccttttttgcttttagagatatgctatagcactccctagccagcttgcgatcgcctctgatttcctgcactccccacttggtagggaacttgatagtctggtgataggttgatggtatagctcgcattttgtggatccatggtgtccccattatgatattatatgctgagggacaatctaccacattgaacctggtttggaggttgactacttttgcataggtgggcagcacgatctccccgagcgttgtagctggctcgccattgaacccgaacagaacagttgctttcctgaggatgtcagcttcctgcagccccatgctctctagagcgcttttgaaaatgatattagttgaactgccattgtctatcaagactcgcttcatgaggcaattgctgacggtgagagatacgacgaggccgtcatgattatcaacttcctgatctccatcttcttcgtcgaagctgatggtcatgctctcgagctttttatcttcaagacttctcggcgggcttggtgcggttttggaaccttctcgggcaaatctcttgggctgcagtatgttagtccacatatttcgaacctccggagatagaattgattaccttatcgtgtaggggctcgggtggcggatgaggtcgttgttgggccggggccgcctttatcttctcggccgcccttcttccccatcaagtgctcgagatagcccttcttgagcagccgtggccacttcctttttgagagcattgcattcttctcgttcgatggccatggtcgccatgatagccgcaccacttggtggtgtctttctcggccgtctgtgcatgccgccatgtggccacctagcggttgttcccagcttttacggtgcgtttactacgcctcctgcatccacgttaaaacaagagggaagcaatggaagggtaatcgttattagccgatttactcgtggccttctttgctacattgttactttcgcgctttcgatatggtcggtggcgccaatcattcttcttcgcgttcgggatttccgatcgtagctaggctcgctcacgtatccgggcgcctcgtcttcctcgacacgtatttcagccatagccccggccccgacctcttcgaatgtgccgcatgggtaccggtcaattcataatacaatctagatttataggttagtcctctcccgaatgcttcgatagcggtggggacatccaggttcttgacagagatcatctcttggttgaatcgatctaggtacgcctcacgacttcattagccttcgggtgatgcgatacaaatcgccagtatgcttctctaggaccacactcttgtggcaacgcatataaaacttgttaattaaagcagcaaaattttggatgctacacggctttagacttatcgaccactgcagcagcagcggccggataaggtggctcaaggacttgcacatggtggcttccagcaggtgctcaggaatggacagggtccacatcttctgcttatattgagctacatggtcatagggatccgcagccccatcatacagcttgtgaggccgggtcacattgatctttttgggaatcctggctcttgtgatttcttccacgaagggggattgagcgtagccatcaggagattcttcagccacaggggttggtgctccaggtaacttcgtaagcatgcgaagtatcttcctgattcgagattctaggagcgccattttcctagctgcgaggatcggcttcatctcgcttcatcgtcagacctagctgctccatcttcaccttcactggcctcggaatcctcgagatcgagcatcttaggaactacgccccgggcacgttgtttgggcgtttttctacttttgacagaatccagttcctttctgaggttgtcaatggtctgctgggcttcagattgagtgcggtgaaggtcttcttgaaccttgacaagaaagccgctttcattgcttcagcagaatcgtcagccatttcaaagttgggttgaagtgtttctttttggaattttaatgagagtttagctgtagagccccacggtgggcgccaaactgtttatgccaaaatctgatcaggtagaacttagctgaggatctacaactaatgcaaatacagctagaaatgacaagaggaactagctgcggaatttaaagaagaggcaaagaaaagacaaagacaccaagaaatggtgacgcgaaaaaccccaggaagagggtaaaaaccgcgggtggaattgagtccaccaatccactatatgagaagattacaacttatagctagcagctagcagctcgtagcttatactaaatacacttgagaatattgtaattgtagaagagagaaagaatgtaagtaagagcaatgtaaagacttatgttttacagagtgtcttcccttctatttatactaatacatttgtataacgttattccttatttgaacattgcataactaactttcctatgaaggtgccacaactcctacaatcaagggagatcttctcttctactggctaaccactttctcctatttctttggcccaacgtcattgcttgacttggtcttagttggcatccgatgttcttccaaccggattataatcattcttcatctctgcttgctgtagctgctacctgatgctctctagctgtgacaaacgcatttcctgcaggtttcagcttaggaaaattttaggacataacaataactatgctagtcattaagctttatgcatttgatcaatggattaatataacgatcaatcatcaattcgtcaaataattaagacattaagtgaagttgtaaatccaaaccaacttgtttcggttggagttgggactactagtttggagtttggacattcgataattgatacttgacttattcctttgtaatctatagtttctgttgtactctactgctcctcatgtactataaatgccacggcaaaatcaattgtaatacacaactttccaactctttcacctaaacataatgagaatcatgagctcactgaacacaagttctctcctgttggtgatcttgaggacatagatttccccctaccaattctccgagccgttttattgctcgagttttgtatatcttgtacatggagtaaaactgtaaaagtcagcaaaaaagtgcatatttagctactatgaaagttgtgagatgagtctgctagctatgccaattattgtaagagctcatttggttaccgttggaacttaattctcatggaaagtcttgtttcatgggaagtaaatccctttgtctatttcctaggaaatggcttttggtgtttggttgaacataggaatttgtaattgacacaggaaaatctaatcaccaaggtggaggggttatgattaattacctatacttcataggaatttccatttccttgaaaattctatttcccatgaattccctatttcctctataccaaacaactatcctattttgtactttgtaggaaatccaaattctagtagaatttgaggtgaaccaaacgacctttaagttttgtaatagaagtatatatatggattttggtactggcagaacaatgtcaaatgttagctctccaagagaatttccatcttgtatgctgttgatcttcattttctttgtttttcagcaacatctttcctgcttttcttgtaaagatgaagaaaagaatactagtgtagtttcgtgaagccgaaaaagggcaaaagctgccctctaaagagatgggattagtttatgtttttattatcatacaaaattatatcaactacatttctgtatgtatattacaacttacaagcacaaaaatatctcaggccacatttgcagttctgccttgagcatttacaaccttttcagtctattgattaactaagccagttaactttcatcaccaagggaatttagtcgtctcaatctttgatcaagttctttcatgacagcgggttcttgctttttcctgtgctttgatattgagttggtcgtcatagaaccaattttgtcaaaagcaacctgtatacgcaaaaatatacagagataaatgaaccggctgtagcacacgccaaagaaattctctgtaagagcttcagcttaccgtcaacaaatcgtcagggtcaaacatatggtgagtagttttgtgcaaaatgtgtataacatcaccaacatgatgagtcagaagcaactcatcttctttcatctgcaaataagagtttatcaatttcattaaaaattgggactcattctttaaaacagaagtatggaagacagagacccatagcacaaaaggaaatatcgtcaccttaaatatagccaaagctacaagaaacaaaacttgagctccctcgtagaagaggacatcccacacacgcatagttgtctgaggaataaactccagaaaggtagcaataatgagtataggagccaactttatagattgaaaaacagacaaggagagacaaatttggtcaaacctccgaaggcaagctttttgaaaaaaggcacaagaaccattcagtggtaacaagggagacatcgaactccaaggcttctaaatgagcagctgtcctgcaatttccctttccattgtttcataaatacatttgaaactattgatatcattagataatcaaaatttgaaggagatacaagagtacctaggatactttttagtgagtaagtccttgaaaactctctgctcaacatggcatccagataaattatttgtgtaacagtcattgactaaaacatcttccagtaggacagcaagcatccagaaagcatcttcttctgtcttcataacgagcaacaataatgctgcaacataatttaaaccctggagcaacaaaattagctgggtgagtgactgcagcaagggttttcagatcgtctacatatatgattgttctattcaatgacaacgcctagacttgtagtatatgcctatatttggcaagcgatgaacttacagttgtatcaatttactagtagtgtcaattttagtcacattatgcatttaggacattgtagctcaactcttgatttccatcaaaatccacatcatcattaatttttataacagaaacaataagaatgtaataaggtggtgaataaatctctttgtttcatacttgcagttgcaaattcgtaactctatattgaccatgtatttcctccaatggcatgacaatgacgtggatagaaggataatagaagagggaaaatcgccatgtggcgactagcagttcttgcctatctttttaataataatataataatagatggtacttggtagaaaagattttaaaaacaactcaaatactacaattagtaatagatgaatgtagactgtagtttacagaaaccagaggcaaaaggagaaaaaaaaagaggtgtatcagcattaacactttgtttgaagtgcaatgatggagggaaaggtaagggtgggaagggggaggaaaagaagggaagttaagactgagcttgcattctccttccaacatcataagaatttggttcattcatttgggaaggagaatgaatccttcatattctctttccttcactcttgttgtacttaaacaaggaaaaatgaatccctccctttccttccaaattcccccatcgaaaaaaattataagtgatgtcaaattgtcaattcccacaaattgccaaaataagctagatagaagaatcacctgacagtaaccaacataagaatcccgaaaagagtaaccaacaagaacacgtcggagcgctgcatggccctctggtgtatccaaccaagagtggccagggaaagtccgcggcaagtcctgcagatttgtaaaagttgatcaattctgcagtagagtttttatattgccctacagatattcaacacaccacaaacaagctaataactcagtcccacaaagttgtccgccgaggttccaacttccaaataaactagagtcaatcactacactagcctattcactgtaatgcaatgattgtaatgatgcatacaggaatttgttggtacaggtgctcgccaaccagaaggttcttcacttcaggttcatcgtcccatttctaaagggactgacctatatatcatccatttaaactctaatagtataatgaggttaccatatctcttacgttatatgccccgccatttttacaacctaatacatgaaaagcatgcatttgcaggatcagaaaggtacactttaactatgatactgtaataccaataaatctcactgaacctgacatatgagacatgctgacaaaatactcaaacccatagcttcataccaaaaacacaactatcaaatcatatctcaggcttcatcaacctcgagctcaacaaaaaatttcataatccacaatcgatgacaggaaaatatcaccaagtgacacattatagcatgcatttagagtattaagtcttgaatacattaagaggcaactatctcgttgctcaaaactaggatgacggtacattatcacgctaatcttaccaaatgtattggtatcacgatatcaatcactacaaaatacatacattacagaaagaggagctctattgataggaaaagtacaaaatcaaaaacctcatcatccaaactcacatgtttcaatccacaaactagtcaattgattcgacatcaataggataaaaaagttaagtctgttacaaacagaatcagccataaacaatacattaagcctcaaaaagttcaactccctggaatctctaaatcaaacccaccagaaaacaaaaaccatttaacaatctaacaaccacccaacaaaaaacataatccaacaaagtcacactcatagctagattcttcaacagttaatcaaaacacatcaactaaggcaacaaaattgagcaattaaactcacatgatcaatctgtttggtggcgggcgtgggtttgccatcagtggccttaataagatcattataataactatcaggcacagtggatttcttcttagcagcaccagacaatgcaaaccagatcttaggcctcaaaacagggggaattcccttcctaattaacctcttcaatgtaatagcattagctaaagctgataatttaagggaagctttaagggttgatgagatttgagtatgaaggtaccaatttgcacctttgctagcttctaatgcccaccaaacccttccttgttccctaactttttctctaacttcattcaaaacatttacatcatccacattaccttccactgaaaacccataaatatcttggaatttcactgtcaaatttgccctccttgtatgaagacttggcctgtaattgattacttgagcctggtactcatattgcaggttttttttgttctgtgcactatacatttctctaaattatgttgattttgtatcaaagtttcaaacttttgaggacccaaatgttagatttgatcaaattggaggtaaattggttcaattttcaatacccacaaaaaaataaccccaaaattgaatccatcaaaacttgaaaatccaaaatgaagaaaatgatttacagaaagatctaatcaatttactttgatgggttgcacctagctaatatctggagacaataaaatccaacattttgcaacccaactttacactttttttataaaactattcaaacgcgattagattgaacaattaaacccaacaaaacaaaattgctccaggagaaaagcaagaacatttattaattcaacaacaaaaggaagtttattcagaataattccaacaaaaatgaaaaaaaaaaaaagataaataaaattgaacaaggaaaaaagtgagttattttttccttgtgctttattttttggtgtatctggaatgcaaaattaggaggtaaagagatgggataagggggtctattgaacaccaagagaaaatctccggagagtgcgggataatggaaagctctcaactggataacagaggagagagaaagagaggagagagagaggtgaggaggacacgacggagaatcagcttgtgtccgtgttgagattgagaccaccacccaataagtcaataacccacttcttttttaaaaaaaatttgagtctatgaatttgatttgtgtagatatttgataagacattatttatgttagaaggagcttcttccctcaataaaaaacaattaaaaaaaaaaaaagaagaagaagttaagaacaaggactaaattgtaacaatcccaagtcattcagcctagttacacatgtcaacgtttgagcgtaaggaaatataaaggaatcattactctcaatcacaagtaggtagtggggtttgaacttgtaacttcaaagtcacaagttgagttcctccaactccaccaagcaagcttggttacgtctcgaaacgcttgagagtaggggatataagggaatttgtactccaaaatcccaatcatatatgaacagtgggatttgaacttaacgtgagttacacatcacctgcaccaagcaagcttggttaaggagcttccaaaatatttggagcctatttttttctccgtatttagacgtttagaatatgggttgtttggtaaatgatttttgggtggctttttattaacttttgactttttcatctgctcaagcaaacaagttgtaaaacaaagagtatttgttcagatttgctaaagagttaccttataacatactactaagtcatgagaataaaaggataaaatgacttttacatagataaactaatacaatatatctaaaaaaattcaaattgtaatttgcatgcgtcaattctaacacaaactttttaaactttttaatgtggtcggagcttttaaatacctatgtgacaagaagcccattcagggccgttcctgataatttttgggccttaggcggacgtagaagtaaaggcccctatatgagtcgatcctaatattttataggtcatataattaaaatcttcgtacccaaaactataatctatattttgttaatgataccaataaaaaataagcacataatattattaaaaattgcacaaaaatagcacaaatttcactaaatattcaaaaagtatatcaatttttatttaactggtcatagttaatttctttttttgggccccacacgatcgtgggcccttggcggtggcactccttgcctaccctcagaaccggccctgagcccattttatttaccgatatggttatttgttctttataattctgaacagttgcaattacatgaaagataactttattaaatttctacttttaagaaaaattgtcaaatttatatgagaagataacaaaacaacatataaaataacaaaaggcttgctagatttattataaatatgatatgacgaatgatattccgaatccttaaggtgtatttcattcgcctcaactatacttgacataatttaacttattaatacttcctttgttttcttatggaatcattggcattttcacgtttgtcaagacatttatttgaaacttaatatctctaattgcatatacgtcaaaattataaaaaaaattgatatctgaaatcttcatgttgagacgaatctaacaagaccttacttgcgcttgttttttcttacataatgatgtgaaatagtttaataaagttggttgatgaatagtgctttaaagcaaatggccggtgcaatcaaaagaatagaggaagtacttattagacctgaacttaagttatcatagtttatatgttgcaacttattagaaccattgtatctcgaaattgaacttgataattagacctgaacttaagttatcatagtttatttgttgcaactaattagaactattgtatctcgaaattgaacttgataatctatacaaatatattaaaaggcgtgcgtaacaacctcgacgcgccatgtggcaccctcctcttgccactagaattttgccacgtgtctcttaaccaacaaagtcaagtggtcatcatttaaaaaataaatatggtaagggctgggttcgaacccctgaccttatgtaagggttttcaaagaatcaccatctcatctaacatctcttagtgatccatgtttccacaaaattacaaatatttgttacttagttaatactattaaacatatcccctacatccttaaaaataaataaatttgcatgttcattaaaattaattatgtatgcatgcataataacatttgaagagtacaataattttttttagaaatttcgtagtatagggtttgatctcgagacctcaagtacatatattaaagtcttaaccaataggctaagttgtatttattgttattatcataaagtattatattaagaaatgaaattttttcttacccgaggcatagcccgggcctaataactagttagaccttaaatgcagcttatctctattatataaggcaacttttgagtactttgatgtccatccttttttgaccaatatgcccctaattataaaagaaactacaacacttaccactccattagttaaaaaatgagaaactttatctctaataaactacaaaacagttacctctcatttttcgactttacacgcatagtgtgcggccagttatcttttatgtcaacttaaatgcctatgattcgagtattcgacgtatcagaactagtttcttctaaatgagaaggaaaaccttctagtagtttctgccctagatagtagttactccattaaactagtagtttttcaatatcgcatgactagttaaatgtgaccatgaggagttaacaaaaatagaccagatctttccgactggcgactaggtcgttcatatgacatactcccaaccaaaccaatgcttgtgaattgagaatactgcaatttgctactaattaaagacttggtccaaaatagtttttgaaaagaaaaggcgtcagaagagaagaggagttggataatttttttcatttatatgtatcatgtcgtacattttttatgtattatctaataataatagtgataatcatactaataatagtaaaaatagaaatggaaataaaaattattattactactagtctactacatatgtttatttatttttttggggaagcaacaacatatgtttatttttggataagtaagctagtactcacaaaatttattttgattatcttttggtgatttataaaagaaatagtgttatgagatcttgttaaaatttaaatgttgttgcgttgacaaatgtgaaaagtttaattatatatagattcaagaaacaaaagtagtaattgtatataactcacataaacgtaccatacaacctaagcaattttagtgagggcatatataccatctaagatgcatgcatggacacaaaatagtgaaaaaaaatatattttttctctcttaaaatatgaaagtttcttaagtgagttttcttttctcctagatttaggttactgtttccatgcaattttcttcctgattatctcccatgcacaagccattaattacttctcaagaaagatcactcgtgaactttttacctgcgccggtaactattagtttcgtcttttggaactcatattgtaccatagtccatagggataaggtttgtttgggttagcactaggctcaacacatgggattcatgcattgatctcttccacccctgggttttctacttggcaactcaaccatgagtttttagggttttgcacttccaacctttcatcaacctagcatatttacaatgcgttttttgtaatacagattacacataaaggaaaccatgcggctgcgcgcgttacaagccatccccatttccttcgttcctccctcctccttcctcaaatcttcgatttcttcttcatcatcatcatcgcaaactcaaccttcgatgtcctctgcgtcaataacgacgtcatccatggaggcgacgcaatcataattctttctctctctccattttccattttctctctccttggcttcttccgtcattaaagttgtgatgaccttggctccagcatatcctacttgacataactccatcgtagtcatgtgaagttaggtggtgtcaattattggtgaggaggcggaggaggcgaggagagagagagagggtgaggaagggggaggaggtggaggaggcaaagagagagacggaggttggaggagtcggggtgagggtacagtgaggggagtagaagaggtgaacgacgattgcatacctatccttttgtgattctactaattaaactatcaaagaagccacatccttttgtgacttctgaccctacttcgagcttacctagagttttgcctcgtaaggctgaatctgaaaatgtgttgaggtcaaaatttgccccagataagatagaggacctatcacaagatgtatttttgatgtgcggtgactcctaaagttatcacatgaacttgggcgaattagcttgattgaattagcccattcgtcgaatctggagattcgaccctgcaatcctgaatgtgaaagattgagacacaacagacatgattcctatcgtagattgagccacaatagacactcggactcctaaagctacttgtaccaaacaatgccaaactcctgccaggttcaacttcactacagatcggatttactagatcatccctcgtcttaggaaacgaagatctttctattacccatctaacactactaaatatcaccctagcacaaccagaaacataaaggataattggatctggacattactaaactaacactgaaataaagaacataaccaatcaatcgaagaaacaatcaccataaccgtaaaaacgttcctcgattgtgagtcttcactacagtgatgcttctctgatgaaccgacaacacctaaccctcacaacaacaaaaactgaagggaagaagaaggagaatgaacttaaccacttcaatacctagaatgggggaacggggaaggggaaactaacctaaccacttaaacatgggaggggaaggggagtacaaataccagacagtggcgatgagatactaggggagtaaggggagacgcatcaaaaagacactaaggaaggggaaggggaaggggagtacaaataccagacagtggcgacgagatactaggggagtaaggggagacgcatcaaaaagacactaaggaaggggaaggggagacaatgacgcacaaaaactaggagactggagatcggggttaggaggatgaaaacaggacgggaagagggaatagggaaggggatacacccgagaccgacgaaaacaccaggggagggggaggggaaacatacaaatagggcaaggggaggggagatgcatgagaaggggaacaacgaacactacgaggaaacacctatcatacgctactgactaaaaataaggaagattcgtcggcggccggtagaacgacctgctaccagcgagcctgcatggggttggcctttacggtttgtgtttttttgggggaaggcaagagagtggcgataggttctagggtttgaggttatgactttttgtgtaccttgtatgatactttcacactcttacgagtaattccatgtacttaaatcaaacattcatgaatgatgaatctgatgttggttgcctccttaactaaaccatcacatgcaacatgattaatatggctgaaagattgtaattcatcttattgttattttagattatgattgtaactacatatcggacggtacccctgtatgtccagtgtccatgcacgcatcacttgtataccgtcagggcatgttctccccaacttattttcagttccaatcagttctgttctgttcctaatttatttactagcattactattagttataatttaatccaattcagttcagttccaatcatttcagtttctaatttatttattagcatcactattagttataattaaattcggttcagttgcaattagttcggttcagctgcgatcagctcagttattttatgtcgaacaaataggcccttaatgtaattttaatcaaggatactacatgtactcagctactcgcaacattaaattattgtttttgttccttcaccatggtcttaagcttttcaacttatgaaaaagagcttttatttaacaaataaaaccaaattaaagggttaagggtatttggagggaaagacctgatgaattttttttgcatggaaatatcacataagtataaatatttatgaaatgagtgttaagttattccatcttccctaataaagtctaggttcacttcctaacttaaatatttgcctgggatttaaaggggagacgggggaggggttagcggtgtttggtttgtaatgggcttttaagtaggggagttatgataaggtagcttagaggatttctttttgcatttgaaaaaaaaacacaagtataaatattcattactcagcttgatataccacatttcggttgtttggttgagagagttttggggtaaaagaataggtttggttactccaaacctctaataggagtgtttgattgagacttgagagaggattaaaagagaggcttgagcctaaatatctaaattaggaaaagctactagttggaactttttggaataacgatttatgaatttagttgtgtaatgactaataatatatatatatatatatcctaaagctggacaaatatactactccctctgcttcaaatataaggtcattctccatcaaaataaatgagattattgcgaaacaacacacaaattaaccaaatttaatttaccgatgtaaaggcaatcaattaagaaagccgcatatcccttatgatataccaaatctggcactgtatatagatctgccatttcttgaaatttctcttcggattcaaaattgtggtgtaatgggtatctccccctatttcggtcatagaatagatgacataagtataaaaaaaaaatcatttttgttcaagaatgaaatcttatcggaactgttcatatgtggttcatccgtcagaaccatatcacatctcggatctgatgaaataggatgaattgagatggtcgatattagaggttgaactttaactttctctcaattcttgttgataaaaatataataaaaaaatattaacatagtatttttcaagacaaatttgatgatataatttttatttgtcatatcataatagatatttgtagttaaagaaaattttcgtgaagcgtgaatgtctgatatttctttaatttgaaatagagtgagtatcatttactaaaaaacattcaccaataaattattttaatatttttattggttatttcacctaataaagtaccaaaattagctaacatttatctatcaaacactttcacacaaacaactagtcagactaaaccagctaataactaatttaaacatcgaacctctaattgtcaaacacgacctataatttcttggcaaaaaagtcaacttttcagattgaattcttatttccccttttttttcattttcattagcaatttgctacataaacaaattcgctttttataaaacctcttctttctagaggaatggtgaggaaaacaacgaaaatatagacaattaagaaattaacggttgaaaattgacttttttgttggaaaattatgatgtgcttttaagtaattaacaaatatttatactttatggttacttcatgcaaaaatgtctattatgtatttttctacaaacgtcctttttaattggtattatatgacaaaaaaaatttatgaaaaattatcataaaattattacaggaaaagttaatatataaactcgatttaataagatatgtatattgaaaatttcctcataagaattattagtgtaataataataaggaaaagtcattggcaaaaattaataaaagtgactttgtgatctactacataccttattaaactgactttgcgatgtactacataccttattaattattattttttaaatgtagtttaactctttttagtttctgaaagaagataattccttaatttgcaaagttgttacaacctaataatatatactagccaaagatacaaaagattacaacaagtaattaggctataatctaggctataaacaaggaaaggagttacacaataatatttacagaaaatatattatgaaaatcagaataattttcatatcatctaacacacccccgcagtcgaaacgggaggaggacggacgcagagactgtcccgaaagtcttcgaacagaattaagggaagacctttagtgaaaatatcggcaatctgataacgagaggggacatgtaacacacgaacctcgccccgagcaaccttttcacgtacaaaatgaatatccatctcaatatgcttagtacgctgatgttggactggattgccggccaaatagatagcactaacattgtcacaaaataccatggtagcccttttaatcggacaatgaagctcaagaaggaggttccgtaaccaacaagactcagagacaacattagcaacccccctatattcagattcagcactagaacgagataaggtggtttgccttttagaggaccaggagagcaagttatccccaagaaagacacaataaccggaagtagatcgacgagtgtctggacacccaccccaatcagcatcagtataggaaataagggtggtgacagaggaaggatacaagtggaggccatattccagagtgcccttgacataccgaatgatgcgcttaagagcgctcatgtgctcctccataggctggtgcataaagagacatatctgctggactgcataagaaatgtcgggtctggagaaggtaagatagtgcaaagccccagctaaactccggtataatgaaggatcactacatgccacctcagtctgagcactgagtttaggtttagtatcaacaggagtaggagaaggcttacaagaagacatgcctgctcgttcaatgatctcctcagcatacttacgctgagacaaaaacaaaccacctgcatggcgagatacagcaatacccaagaaatagctcaacagtcctaaatctttcatagcaaactcagagccaagtaaagaaatgatggactgacggagggcagtagaagatgcagtcagaatgatgtcatccacatacaataataaatatgccatatatgtaccactacggtagatgaacaaagagtgatcagatttgctgttaacaaatccaatcgtagtaacaaaatcagcaaatctgcgataccatgcacaaggagcctgtttgaggccatataaagactttttcaacaaacatacatgatccggatagataggatcccgataaccaacaggctggtgcatataaacagtctcatttaactcaccatgtaagaaagcattcttcacatcaagctggtgaagaggccatccttttgacaaagccaagctaagaaccgtgcggatggtagcaggtttcaccacagggctaaatgtctccccacaatcaatcccaacacgctgagtcttgccatcacctacaagacgagctttatacctttcaaaagaaccatcagatttctctttatgagcaaaaatccacatagaccgaataatattagcatggggaggacgaggaactaattcccaagtcttatttttaattagagcatgatattcatcatccatagcctttttgcaattcgggtcacgaagggcaaaacatgggatttttgggaagaggggatcggtcggtatgggtaacaagagaaatgatgttctttttcttaaaaattccattttgacttcgagtaatagggcgaggtgggggatgggctgtggcaggagggttagaggccgtatggtgaggagagggagtgggccgaagggtaggcccactgccagggggtccagcgaagccaggtggcggggagacagcaccaacaggcctgcctgggggctgggtagggggcccagacggaggagaagggctgctgggctgggcaggaggcccataggtgggggaagctggacggggtgcgctagagggctgggctaagggtccagacgagtgggaagaggtgtggggcagctcggtacaaggaggagagggcggaaaattttgtggagttggggccgaagataggggagagtccaaagaactaatgtgatccaaaaaatcatagtgggaggagagaggcgtgtggagtgttgaaaatggaaaagacttttcatcaaacaccacatgccgacaaatgattattttgtgagaagaaagatcatgatttggaggatagcccaagaagacacatggagtagaccgggcttgtagcttatggatagaggtggagggaaagagtgggtagcaaagacacctaaaaacccgaagatgagtataagaaggttgtttgtggtatagtttttgaagaggtgactcaaaggcaagggttttagtgggaagaatgttaataagataggtagccatttgcaaggcatgatgccaaaaagtggaggggagagaagcatgagatagtaaagtgcgcaccatattgtttattgtacgaatttttcgttccgctttaccattttgagatgaagtgtatggacaagaaagacggaaagaaagaccatgagttttacaaaaatcccaaaaaggagcattatcaaactccctcccattatcacattgaatatttttaatttcccgttcaaattgtgtgtggatgtatgtgcgaaaatgaaggaatgtagaatagacttgtgatttcttagcaagcggaaaagtccataaataattcgtaaaatcatccaacacaacaagataataacgatgtccactactacttaaaacaggagaagtccaaatatcacaatgaataatatcaaaaggcatgaaagtagtagtaggagatgaaacaaatggcaatttaacatgtttcccaagaggacaagagtagcaaaaatcatacttgctacctttattacaatcaataaaattactatgcctaagagaatccataacaggtgagccaggatgacccaacctagcatgccaaagagaaggtgcaagggcaacacaagtggatggaagggtggcttgagttggtaaattagtgatgggatataaagccccttgactctcacacctcatgagtggtctccccgtcagaaaatccttcacagaaaacccaaaaggatcaaattcaacagaaacagaattatcagtagtaaatttgcgaactgagaccaaatttttaatgattttaggtgcatggagaaaatttttgagagttaagggggggttaggcaaaggcaaatgagtgtccccataaccacgaattggaatactatgaccatttccgacaattataccattagaagtgctcaaattaaaataagaagttagagtaccttgggaagaagtcatatgataagtcgctcccgtattcatataccaattcgagtccggcggatttagagcaagggtgtgcatggcagcctcgatatctgtcgcaacaggggaggcctcaactgaaaatgcttgctgccgtggacctgagccaagaatgctgggcccagacgcaggtggaacctgctgctgcctattctgccaggtgggccgcgtccagccttgggtaggataagggcagggaggataggcccaaggtggataggcccaccccccccaaataggccggaattattccggccaccgtgaccacccccaaaaaaattccggccaccggaatttttgtttttcgaatggtttttagatttgtttcggccactgttttgaagtcgagcatggggtggatcattaggcgacgagtcatgagacgccaccatggcagacgaacccgtggccaccttcttggccaaacccgcttcctctaaaacaagcatggaacgggcctgataaaattgaggaagcggatcactctggcggagtaaagtaccaagaccattgtacgcctccgtaaggcccgcaaccatctggagaacaagacggttattagagacaggagcaccaacgtttttgagttggtcggccaacattttcaaccgttggcaatatgccgaagcattaggaaaatcctccatagccgtgttggagaattcctgttccagagtgacagcccgggaagatttgttgtcttgaaaaatatcccgaagacgttcccacgcttgttgagccgataaatcaggctcaagaatggtattaaggaggtcatcggagatggtagcataaatccattttaataccgtcgcatcaatggtgagccagtcctccttggcagcatccgtagaaggaggagtgactgtcgacgagggaataatatggtcaatgaccctatgagaacgtgcatgaattttgaaaagctccgcccatgtagcgtattgcacgttttccatgtcaaggacaatgggtaggttgtgtttaatattagaagaagaaagagcattgagagaggtagaagaagaagaaagaacattgagagaggcagaagaagaagatggggaagaggcggcgtccatggctgccgacagaagcaagtagggcggacggctaatagggtagcggaagagagaggaaaatatccctaggctctgataccatgaaagaagataattccttaatttgcaaagttattacaacctaataatatatactagccaaagatacaaaagattacaacaagtaattaggctataatctaggctataaacaaggaaaggagttacacaataatatttacagaaaatatattatgaaaatcagaataattttcatatcatctaacagtttcctccttatgttcctatttgttctttttgactttttttgtctgtaaaaatgattccaaataggacgaatcaaaaggaataaagagagtatttaaaacaatatctcataaatttaacgattttttcaccacgtattcctaataaattaaaaaaatcaccatataccctcattgtttcatattttcactatatatttgtaaatttccgaaaacattcaacaaatgaccattttttttttgagggggccaaatgaccattttctaatggacattaactcgtcgtttgcattatttataactttgttattataaacctaattaacccctcccttcatcctaaccccctaaccctaacgccctaattaacttgaccccctaaccctaaccttaaccaccaccactagaaccctaaccaccaaggggaaatagaaggggtggcgtgggggtgggggtgggggatgtcgcagaaatgggggtgatggaggcaggtggtggtggttagggttaggatattagggtggagggagggactaattaggtttataatggcaaagttgtaaataatgcaaacggctagttaacgtcagttagaaaaaagtcatttggtgaacgtttttggaaactcaagggtatatgccgagtttctgaaaattggagatatatggtgaactttttaatttgtcagaggtacatggtgaaaaactgatattataaccctatcaccaaatacatgcaatactcagggactgttcttcccaacttattttcagttcaactcaattcagttcagttcagttgagttgcaatcagttcaattcagttccgatcagtttagttccgaatttatttatcatcattactattagttataatttaattattttcaattcagttgtaatcagttcggttcaattcagttcatttgttttttgccgaagaaaacattcccttgctctgtcacacgtttctaatatacaattttgataaacatctttaactacatattactgtggtaagaatgtgatactcactccgtcccataatactctttacacttttctttttcatctgtctaacatattttttacactccagttcttggatattatccacaattttttacactccagtactatttttactacctattaactcctatcatatctaccttttcaatagaataataattgctaatcaaacaacttattatctaaaaatacgtatcataataagtgtcaagaatattttgggacgaataagacttttttttattgagggaccaacaagactaacaagatctcaattttctcatgttaatgtatagaaagaaggaaaaggcacacgttgtacacttacgcttatttaaaaacggaggagatatcactttggatagcaaagaggacaaaatttaattgtagaatggctagaatgaaattggaatatatgaatttcttcattgtgtaacaaatcagacctttccaaataagacttcccaaacatactcgcaacatcaaaaattcatatcttcaaatatagctaccaaagccaattccattgttgcttatgtagtcaaaacttatacgtgcttgttggacaaaaaatcgtggtttcgactggctcatctggcccaagcccgcaaatgatcacaagtgagcccggaaaaaagaagtcgagctaaatttaaaaaaggatagttgataaaaaaaacgatatcccatccgcacacaatcaagcaatgtcacttcgatcaagcatatcaaccaaagtcattcgtcttgggaatctaggtggtaaccttaagtacattgcatcatcaatctcaataggcagatgagtcgcaacgatcacaattcctcccttcttgcgatgctcggcaattatatgctccaatagttttaccccatcatcatccaaagcaacacttggctcatcgagcaaccaaataggccgatcaattgcaagcaatcttgcaagctgcaccctttttctttgacccattgacaacatccttgccttttcctttgctaatcttccaagtcccataagctccaatgctggtagagatcgcccttcttttccttcgagaacttcaaaccactgaatattttccaggactgtaaatttctctttgatagcatctttaagagaaacccatcctagttgaagcttatattgatggaatactcctgactgtgtaatgtcatgaccattccaaaggatttcaccagcagaaggctttgaaaagccagctaacatgcgcagaaacgtgctttttcctgaaccattgcttcccgttagcacaagtgcacctccatcatgaactgatacattcacatgacgcaaaatttgttgggcattccgcatgcaggatacattgttaagaagtatacgaggaagtggaggttttcttagagacatctatgcactgaaaagaaaggaatgaattaaaaagatacataaagaatacaataaacaaaataaatgaggagtgtctcatcaccaagttacattatcaataaccaccacatacagaaacattcaagatagaaatctacataacaaaaatttgcaaatattgattgtgcattgttttaataaaaaaaggcataaatgtataacataccctgagaaatcaacacatataacaacgaaaatctaaatgtagcaaatgaatcacacactctctattctcaaagtctcgatatgattggataagagaattgagagagaaaagaaggggaggagagagtgagcgattgatattctttgatttggatatggattagggggagcagggaaactgaaaggcactggcaaatccaactcctaaagttgaaaaaatacaagagtaactaaccagcatgaggcgaccaggctgtgaaacaaaacacaaagttgcaaaggcatatactggttgttcacccagttgattattggccaaaactgcaaatgacggcaaagtgaaaaaaggaatcctagcctttattataccatcccagataccataacatatcatcagtaatatagagcaatagaacactccctgataaagctatactccgagaacttcagtaaaatgagaggatgattcaagaaaagagcataatttaccttccacgaacttaattgtatagtaggatagtctttcttgaccttatttttctctagtgaccatgaccttcctgatacaagagagtagaaatattttagtgaactcagaagatatcacttgatcttaattgcaacaaacataatttattccatatcaaagcaaggtgcataacagacatcttgcattatgaacttgaaatcttccgttatatgttgttaaattgatttgttataacaaaagtatatgtagcaacaatatgcagcaaataaccaagacctcaattactcaactttcacttattatttttaggactgtcaaaagtaaaccagaaatttgtgagatgtctcgctcagagtcaaaaaaacaggtgatgaacccgttgctgatagaaactggtattctggtgaactttctgttccaagagagaatttaatcactaaaaaacattcagtcaataccatatttgatcaacataaagtgcacgatcacataatggtagcgtcatggaattgcatggccaatcattgtgggtgttacactctattgacgttgcacgagagtggtatttttcatccagctaacacaaagctcaatgtatggaaccctaaatttttagctgaactgaaaagggttataatagcttcattatgatctaaagggaccctattgacattgcgcaaaagcaatgttttttcagtcagctagcactgaaaagggcactcctatcatttttaacaagtaaaataaaacaatattgtgatgttacatttcttgatgttaaatatttgacttatcatacctgagtaggaaactggaaatcatagaagtaaaatatttgcgaatgcaggaaggggctttgcattaaaattgagtagtgtagattaaaagttcaataagactgaaataaaaggttctatagcacaaaacactatctacacccagcaaacatgactcaggagaataaggtatctcaaaagaggggcaaaagcaaacaactcatctaacagagccatgcctaatctgacaacaaattttatttcaaactctttgtaacaacatagccaagtgagcatcattttagcgaaaagtaatggacataacatttgatcagattaatctgttgatcatgacttaaaagttcatgcttttaggtataaggcagttcgaaaataatataggactattctgaacctgaactgctatggatccccactctccagatacctccctggcggcaccaaatctcaaaaagagttcaacaatctctcgctaaaaaccacataaccaagaaatgagtagaactacacaaaatcttgaaaatcatgaaaaacatctatctgatttgagcaggatgtcaaagaaccttaccagtatctattaaacacttattaagaagccaaaaaccttttaaaaaaaaacctaatatcaaatatgatctaaaaacatgaagctcgttataagatagatctagatagtgcggatccaagatttttaactaggtgttggcaccaaccaattcacacaagaccacaagaaatatattcaacatatcatgtaatatcaaatcacaaccatcacaactctgcaatttgactagtggcataattctattatgcattggttttgcaaagaaactagaaaaattcctttcattaattcgcttcattattgaaaagttaagattatattatattcatcttaaaatcactttcctatcacatcaattccacaacaatgatttcatcaattgttccaacatcaatatgtaacagtagttccaaaaactcggagtaaattatcgagcaaaataggagtataaatctatacatactgatataaaaggcgttcctaaacaaggaacggtatcacgtggcgctcttcctaaagcattttactccatgtaatccgctacagtaaaaaaaaaactagaaattgcatagtataaggtctgatcccacgatttcaaggttatatattaaagtcttacccactagtgactagaccaatggatatttagtgttatcattttagtataatattaataaatgaaaattttccttgcctggggctaacaactagtttactccatgaaagcatgaaacaaattaagcaattttgcgtgagcatcattaaaattgatataaataggcatgaatttcgtctataaactatataccaaaagaatcaatacattcggcaatgtaatttccaattgtgcataaaaatcatattctaattctagttcatcaagactcacaagtcacaagaaatatatccaaaaataaaaataagaaaacagaaattttgcaacggcgatacgataatcgatgaactgacctgctgctgctgccgagtccaccaccactgataatcgtggttgtcgaattgccgtcaactttgcgcgcgttttcaagtgacagtgtattgttgagtcaagattaggcgagtgagattgcccgagtcacgagttgtgactcagagagaaagaaagagaggggttgaagtagaaatgttactggtatagtggtatgtggtggttattgataatgtaacttggtgatgagacactgctttccggcgagagagagttgctattgtcgttggtgagtggtgacatatgaagagtataatagggtggttttacatcgttgattaaggcctgttctcaccagcttattttcagttaagcttaattcagttcagtttacctttatacaatacttttactctcacatatcactattcatttcagttcagttcagtttaattctgaacagttcagttcagctgttttatgccgaagaggacatgcccttagtctaaacatgagttgactatgggaatacattaaacatctcggtaaacaataactttttgtttggaaagacatattaaaatagtcattttgttgaaaaatacctaacaaaaacttttttaaaaaagaatttattataatactaaggattttttttttatttctaccactttttaagatcacaattttaaagattttttttatgggaaagagttgtgcattaagcaagggataaatgtccataagtgcacaggaaattacaacaccaggacaatgattcacccaacattattcaacttcaaaaagcactactttatcaaaattatgggcaacagtattctcatctcttttaaaatgagcaaaggaaataatattaaaagcattgcacatcgaaagaatgtcaccaagtatagcatccaagtctcagaagaaaattgacgcttttgtcaattttgtggtcaccactttcaaatccgattcaatgatcacatcttcataaccgtgggatttggctaaacgagcagccatataaatggccttgcattcaataacctccgggggccaaaaagcatgcacacgcctagttgcagagaaacacaccttaccatccgcgtcaagggcaacaacacttagtcccacaattttcaaaataaccaccgtatgagttcattttcaagatagatattatataagttcattttcaagctaaccactttataagttcattttttcaaataaccatcttatataaactaaatctctttaaatacataccaattaacatatttcgtccaagaaatcgatcttaaaaaagggttaaaaccttatatacattttaatgaataaaggtggaatgatggaatcatttttaaaccctttttgaggatgatttctttgacgtaatttgttaattgatatgtattttagaaggatttaagccataaggtagttatttataaaaaaatgtacatataaggtggttattttgaaaaccttgattttataaggtgtttaaagtaaaaaaaaaaaaaaatcctaatactaacttttgttatataagaccaactcactgttttccggacaaaaattatttttttggcattaacttttcttccccttcctttctcataaatgggaccaacttattttttttctaccctaatctcttaaaatgattaatatgttggtccaatttaatgagaaagggaggggaagaaagttcatcgtcggaagaaattgatatttttggccaaaagacattaaggtggtccttagtataataaaaggaagtaccataataataggtcttttctcaacaaaaaaaagtttttattaggtctttcccaacaaaatagttattttaatagtttttttcaacaaaaagttatggtaaacaatatactccctctgttttttttagatgtaacatattgactttgggcactattcatccaatacattttgtccactaattgttatttatacataagaaaaaatatagtcatgtgggatcttgtttgattcgtcacacggtatacactttccaaatatatattttttataatttttacttttatactattggagatattatcggtcaaagttgtgcctcggcaaatgtgaaaagtccaatgttatatctaaaaaaaaacggagggagtagtatttttattcattgcacacacacgtatgtatatctatatgtcgatctcaatgcttaaataatatgattcatttacaaaatccattacaagataaaaatttgatcatacctctatatcagtcaatgtataataactcgatcttgaaactagtgatcattaaatgataaacaaggtaacgatgtgatataaatgaccggatctagagtttaatcgaagtcgaatcgacgttcgatagcatatggacctaatgcttcacaatgatcgaactaaggtcataagcggtttagccgagcaaacttgactcgacctaagtgttcatgaaacccaaatacgatgtatgcaaattcggcttaaaaatgtccacatgtgatcgaatttagaaatggatcgacttgaaggaaacgactcatacttgtccgacacttgtcaattcgatgattcaatgcgaccaacctacttgaacaaaacatgaatgatccgaactagatgaacaaaacacgactgatccccaccccaagcattgactgacataaaattgacatgtttgggtctgggccatagcttgttcggccaacctatgtttaacaccactaagtaaaggtaccattgtttttttttctaaatggcgttaccactactatgatccataactgttatggagttcaacacgagttattttacgagctatcgatttacaatatttttatgtttagttataattttttttagaaaatatcatttaatagaagtgttttacctcgtttaaaatcattgtagttttgttggaaaggaattttataatggtttaattcgatgagtagatcagcaggtcattagaccattattagttgaaatattggaatattgatcatcatacatatgtgtatcgtccttcccaaacgatctgaacctaggaggctatgaaactccatggaataatgatgggaactatgaagtctcaaaagtagtaatggatctagacaaaatttatcgatatcacacttgtaacatgattatttactcttaatacttcctctgttccaaattgagtgcaacaatttggttgacacagatttctaggcaaaatttcttaagggttgattaacaaaagtgagggcaagttaccaagtaccaccactacctactgccaccaccaccaccaccaccaccgaggcaccactaagaacgccgaaacgccgccaccaccaccaccaccatgaaaatactttcttattgcccccggaattcgaaacccaaatcaaccgaaaaccaccttcttgctgcccgcgaaattctaaatccaaatcaactaaaaaaccaccttcctgctgaccccactatcgaaacgccaccatcaaaatgagtgagatcggaccgggcaaaaaatagactgaaaggtcatttttgacttgcctaaagcacaaaaaaattgagcccaaccatgggtcaaaaaattctggccaaaaaccgggccggaccaaaatgatcagctctacctagtggttggttgtcggactagttatctttcttgataataataaaaaaaaaaatgaatgttgtcgagcaaaagtgcgcgccaaataagctaaaaccgcaccggtaaaactaaaaccccttctcatctctctctactctctactctcctcattcaatctcaaattctgaaatcaccataaaaatggtgaagcaaaaacaacaggtaatttctcgattctttgctccaaaacccaaaatcccatcatctccttgttccaacaatgatactaaaccctcatcttcatctcctactcctaaaattactacaaaagtctctttctcccctgcaaaacgcctcaaatcttctgaatttatatcccccattaacatttcttcaaaaagacccaaactttcccctcatacccaaaacccaattccttcttttcccaattccaatcctatccttcaccagaaattcctcaagaagcttctagaacctactgatgatgctctagatgcttcgaatttggacaaagaacctcgtacttctagaacaaagtataccccacttgagcaacaagtggtggagctaaagaatagatacccagatgttttgttgatgattgaggttggttataagtataggttttttggtagagatgctgaaattgctgctagggttttaagggtttatgcttatgttgatcataattttttgactgctagtatccctacatttaggttaaatgttcatgttaggaggcttgttagtgaaggctataaggtgggtgtggttaaacagacggaaaccgccacaattaaggcccatgggtcgaaccgtggcggtcctttttcacgtgggttgtcggcattgtacactaaggctactatcgaggcggccgaggatttggggggtggtgaggagggttgtgggtcattgaataattacttgttttgtgtggttgaggaagaagttttaatggaaaatgtggattttgggattgaagatgtttctgaggtgaagattggggttgttgctgtggaaacatcaactggtgatgttatttatggggaatttaatgataattttatgagggctaggcttgaggcaatccttttgagtttgtctccggccgagttgctgcttggggagcctttatctaagagaactcaaaaggtaaattgtctacttctaatcctaatttatagtatatgtgatggtgtttattgcaattacttgaaagtgttagattctggttcaggctgttattttctgtcataattgtcttttgtaagtaacaactaacaactcatcttggatattagtacaatagtacttaattggaatgacgaatatgagaactttcatatgtggtgaccggtgagaaatcgcattttctagcccatatggcatgtctattagagcaaaccagctaaaactgtcccaacttttggataggtggacgatgcagaagtagtaattttaaaagttcttagttattagactgctaccgtgttattgattgagtcgcgtattgagtttcctattatttatttttttgacttatcttcatagttgctattggcatatgctgggcctgcatctagtgtgcgtgtggagcatgcttcacgtgattgcttcaaaaatggtggtgcactggctgagctgatgtctttgtgtgaggacacaaatcaaagaaattttgagcatttgcaagatcgtgacggaggagttgctggggaaggacatgggccagcaattaaggtatttttttgctatttcggtaaacattttgtttatgggcattttggctgttctagttgtctataagcttctataattgattaatcagttacgttttgttgatacaaaatctgcttgttcccttgtctactttttatgtttgaagtagtaatctctccatttaatgatgaactttacctacgggatgagcatggacatgcgaatagctgttaaatgtaaaataaattgtttaaattgggtagaaagtgaaaagaattgggaaaagtaagcattgtagggaatcctaaaatggaaaatgtgaagttactttctcatcgtacactattttttcaaccccccccccccttattattttcctgtaatccgaaattttgaaattataggggatcatggatatgccagcattggctgtgcaggcattggctgttaccatgcaacatctcaaacagtttggtctggagaagattttgtcccttggagcttcatttcggccttactcaagcaattttgagatgaatctttcagctaacacgcttcaacaactagaagtaagttgcaagttttggagttcatcagtacaggtcttctaaaagtcaataatttatatagggtttctctctcactctctgtaccgagctctctgcagaatcaggtttaaatttagaactatgagatgttttccctttttgagttcaaactttgaccatgaacttttaaagaatataacgctagacactatagaagttctaattttatgattattgttaattacgatttatcaatgtagttttatgatatttatcaatataatctaagagcattttgtagtcaaaatgagaccttaaaaaacaagaagcaaatattcaaaaaacagaaatagtatacaacaattgaccaacgagcactagcttcgtcaacagatagaataggattttgtatttttcttattatcgataattgtttgttttgaaagttattttacactttatcaaggttttgaagaacaacagctatgggtcagactctggttcattgctgcagactatgaatcatacccttacagcatttggacaaaggcttctaaggcattgggtatgagaggaactgaactatagcttcaagtacttcgattttctgtctttgactgtaatctttattccctttttcaggtaactcatccattatgtgacagaaacatgatagctgctcggcttgatgctgttgcagagattgcggaatctatgggtggctgtagcgcttctatcagataccgacatcttgatgaggacaactctgatactgcagctgttttaagtgatatgaattttgtgctatcttcagttttaagtacactgggacagtcccctgatgtccaacgtggagtaacaagaatttttcacaagacagctaacccgtctgaggtagtttctttatttattccttcacgcttcattgaaaacctgaagattcttaccagttcgtcatggatttataggttactttacaatactagggttaactgcaactctcatagtggtaaatgtatttcagtggttacgtgaatagaagtctcaaataagttatgtacaatgtgtgagtcatgattgtgcaagtctcttttacttgtgctttgaagtactatagcgtacataagaaagtagggagcacatgtatgcttcaatttttgttatcaaacgtattatttacgttgtccattaaaatttgttctatagtcgtgttcagtgagatattaaagtcctgtggctgaaatggaggactgaagaaatgtatgaaacatgcttcctttcagctgtttgatttagtagctatttgaataatttcatcttggatttgtggtcgctttggattcattatctgcttcagtgtcatattttactgacagttgctgaaaactgaattctacagttcattgcagttgttcatgccattttactagcttcaaagcaacttcaacaacttgaaattggaacagtccattctgctttattgagaaacttgattcagactgcttcttcatccagcttgataagccgttctgcaaaatttatgtcgtccctgaataaagaggcagctgaaaagggggatctgttgaatctcatttgtactgatgatggccagttttcagaggtttttgcaagaaccccgtcttcagcttcttccatctaattgaagtacctgattttttgtcgatgtgtaccattcatgtcaggttgcagaagctcgaaagaaggcagagggggctaatgaaaagttggaatcgcttataagtttgtatcgcaaacagcttaggatgcatactttgaaatttgtatctgtggctgggacaactcatctgatagaggtgatgtgcctaatgctttctatttttgctatatcttgcattgttcggaggctgtagtaaataatgataaaaggtttaatttactggatgtatttatccatttattcaaaagaccaaattctatttgcagttgccttcagatgctagggtacctccgaattgggtgaaagttaatagtacaaagaaagcagttcgctatcatccgccagaagttttgactgctttagaccagttatcattggcgaatgaagaactcactgtcatttgtcgttctgcgtgggataagttcttgggggaattcgctagacattatgcagagtttcaggctgcaattcaagcacttgctacattagattgtttgcattctctcgcaatcctctcgagaactaaggtattatgtagtaatattcgcacttcatattcaggctcgacttaccacttacctctcctttcctgcatactataacttttaaccttatgttcatcttttgccggctccatgcctctgttacctatttcagaattatgtgcgtccagtttttgtggatgataaagaacctgttcagatacagataatctctggacgtcacccagtgagtataatcttatgtacacttacattttctttgtgaaagttcatttttttttatggggcagggtaggggggtgaactgtagtcctagtttttggatttatgggaagttcacttttctgaatttaatattcttggcagtgtaattcatttgttttcgcttaatatagtatgaactttaccattatttctatgccacgtaattggttatgtatgcagaggaacagtacttggatcttgatcacacaaatagatgtcaatgtatattaaagaaaatgacttgtgcttttctttatttgcctaaacaatggagcactataggttctggagactatattagaagacaattttgtcccaaatgatacttgccttcacagagatcggcaatactgtcagatcattaccggaccgaatatgggtggcaagagttgctatatccgtcaagttgcactcatttcaataatggctcaggtgcgtatgagctggtcaacacctccacccccttctcacaatgactaattttccttttaacttagtttaaggttgcatgtcttagtgcaccattttatttactgtctccatcccatcttaattcctgactcaaacttttgccttctgttagttcatttgcaatttatctcataactgttcaaatgatctgcgtttcagacttaagcatgctatcagacatcagttacttcatccataatactctccttcagtccttcctcttgaatctagtttacatcttgtcatataaattgctgatcctgtaacttaatactcgtcttttgattgtttttctctaccatttacaagccattaagttgcttcgcctctgatatctctgccgaacttgctgatactcgaatatagagtttcacaaaaactgaagttttgggaacgactgcgatctcttcttacaatgtttccaggtcggttcttttgtaccagcaatttctgctaagcttcaggtgctggattctatatatactcgaatgggtgcttctgataatatacagcaagggaggagcacctttctggaagagcttagcgaggcttccaacatactccacaactgtacagcacactctcttgtaatcatggatgaattgggcagaggcacaagtactcatgatggtgtagctattgcctatgctactttgcactatcttctgaagcagaagagatgcatggtgctgtttgtcactcactatcctaaaattgctgatattcagaaagaatttcccggtgtagtggggacgtatcatgtctcatatttgacgagtgggaaagacgaagacgttgcatacctctacaagcttgtgccaggcatttctgagaggagttttgggttcaaggttgcgcagcttgcacaggttaggcattgtcattcttcaccacgcctgtcattgtttctaaccaaaccacccccccacccccccccccccccccacccccccccccccccccccctaaaaaaaaaaaaaatacacgaagatagacaaagactctgcatcagtgtattgcaagtattagcacaagaaataatgcaagatcaaaagaagggcttcttttttttggtgcaatgaaaagaagggcttttgacaaggacccaaatctgagatggcagtttgagctttgatgaaagtgcaattctatgtatatatatatatatatatatatgtgtatatatatatatatatatatatatatatatatatatatatatatatgtatatatatacatatatatgtatatatatatatatatatacatatatatgtatatatacacacacacacacacacacacacacacacacacacacacacacctcctcggtttctgtttaactgtccacctttccttttaagggaaatgtcacaataagtgacacataactcaaagcggtaaaaaaaacttgtttattacatcttttcccctatttaattgtttcactacttaattctcaccctccattagttgaacaagtggtcccccacattctctctctaaggttcttggtattccccactttctctttgtgtcacttaaaaagagaacgaggaagtatatattattgatgcgagcacgtgtaatattgtaattgactagaagaacaaactgtgtcggattatcattggattcatgtgaaggtgcatcagttaacacctcttaatttgaagttttggaaatatcttgatagttggctgtcggttttgatggctttgaaattgtcttacttggtcttgcagcttccaccatcatgtattcaacgagcaatcatgatggcctcgaagttggagacattggtccaaaggagaacaggaaaccgccttggagaaacattgttttccgagagactgtgcacaagtggtgaaagtgaagcatcagataatttatcagatcatgctaaaatgttggatgaaaatgatgacagagacatggttcgattgagtactgttgcttctaagaagttctttcgggatctgtggtcggccttgggtaacaatgacctggcgaacagagatgattttttgaaggctgctaggagtgctgcagcagagttgatcgcttggtaagcgtgaaaacatcatttattatgtcaagcccctccccccttccccaccaaaatcacagccccgaaaaagatagatagcataatcatgagaagacgactttcattttcaccagaacaataattcgatcatagaatgtgattatggaagctttctcacctatgatttcaatcaagcacgccatgggatattatgcgcatcttcatacatccatgacccacttgattcagctagttatacccctatttgatgtatcccaacaaaaccatgcatatcagacatttcactgatcaatcatgtcaagttctcataagtggttccggaccataaatagcaatatagcatgctgtttctatatcacttgattctagatatcatatggcaatacatagtcatgtcttaactttgaagatcctgctaaagatacactaaattgtgacatgaaagtgaggctaaagatgtttgtagtggaggagctcttctatgaatttaacagtaataatgcactctttcatgtgtaattatggtggtttcacgcaagtgtactggtttccatgactatttccttgatgaattgaggcaggaggagggggggcgctcaagtggtaagagcatcctcttaggtccagagggagcctcgtataagccggttcgaaccagatcggacctgcttgatgagtagtgtttttcccctaggactttgaccacactgtgtatcaaagatgggaaccgatagtggatgcatcatataccttccataaacgatttgccttttgtgctttttgcagatgagtcagtgctggtaacttttttgttctgcggcttgtggaagtatcaggaatgcatctttgccctcaacatatttcagcaactccatgtgtgatggaactttgtgtacataaatcatagatataacaaaatcggggctcattttgcagtgccctattccgtaatttgcatatcaaattttgtaaatcttgatgtcttgagatggagcagtaggcggattctatggttgagttagtggcgagattttacatgtaccaaatgaatactttacccattaatgtaagttacctttttaagaaaaatagttatttgctgagctagattccataaagcagcaatgtctattactagtcgacaatttacccatagggatggcaagttttttccgagttcattatggtaaatgctgaaagaaatgaatgttccaagaccacagcaattaaacaagataagagtaatactccctccgtcttttattagtttaccccttttgacttttgacactattcacatatatgactttgactatcttttgtaatttgtatttaagaaaaaatatagtcatgtgagatttttgttggattcgcctcaatgtgtattatccaaatatcaactttttgtaatttttgcttatcgaaaattagagatattaaggttcaaattagtatctcggcaaatgtgctccaaagaaaggggtaaactaataaaagacggagggagtatttagttatttactcccttgttactcttcaaagtcatgatatcagaaatcaaaagtaatatttagatgaaatcatgaaacagatgtgctttattaacttgcaacagtaaaataatgataaattagaaaatacaactccagtcccacttgttacatacagaccacaactaaaaaaaataagctctcaaagaagcttcatttcttgcaaagaatacacctgcaggattattatagacttttgaacaatataaatagcaaatgaaaatctccacaatttggccccaatataatgactctttaaaaattcggagtgctccatggatatgaagccacagatcccaaagcatcaaaaccaagccatggcagaacacaaccgctggtctacaggtaatctacattgatatttgatctcagcccgcttcaagaaaacgaggcacatcaaactaaacaaggttgatagtgaatgatacatatggatggggatctgcttcagctgccagaccagccattgctcccacttcatcctcagctttccagtgaacactgcaatcataagcataccaggaatgaatcagagagactaaaaataatttacctgcactgcctagtagtagaaagcagttgcattaacattaaaatttcaaataaaaacaaaatatgaatgctatgtggcaatggcttgtggtggtacattgaagaagaaagcatatcattggtgtttagatggtctatatgaaaggatgcaacaaactttatagtagaaccaggacaagctgcgaattgctaaaaacaccattgtcatttagtcatccaacagtcaaagccataaagttgatgaccagagattgtcatcatgtgttcgctaggttgagttactaaaatctcataattattatcacttagaaacgaacaccataaagcagagtgttagatgcaagattaattacctgttcccagcagtacaatttcgttcgagaatagagcgtactttcttctcacttttctgagatggagccaaaacacatgcctgagataaaccaaaattaatcagtttcaatgacatgcgaccatttagataagtaatataatgaaaaattagcttaaggcctaagtaccaagaaatttggtggcaagccatatctcaatatgctctcagaaaatacacgtacagcacagaagtgcatccatgagctgaaaacctgttaagacacttcatattagtttctgcagatagtaaaaagtttttcagatgagagtttctgcaaatagtgtgaatggctcagcaataggttagtgcaaacaaacataggtatgggagcaatactaactgtattagtataataaaattataaattaacgcttatagtagaggaagaccactgtacatctgaatcaataagctcagcaatagaacaaccaaccacttgtcctcaggatttgagtttttctctttaattattttcgattcccaaatgcccaatcagggtccaaacaagtatccttgcagtcctagggctctagcccgacttcccgagacctttggttaaacccccttgccagctgatccaagcacttgttagcacttgagattttcactggacaatcatgtgatcaacacgtcattttttgtgaggctcaaggctttaaatctgatcaaacctaagccaggtagtattaaccggttatcaactatactaaaaaagcattcattataacacattgaaaattttctaaagaatcgagatggtttgactggtttttttgctcttcacccgaacttaatttcgatccaaatgcagcttcaaattgatagttttaaactttaaatcaacaaccaagcctagaactgtcaatttgggacttctacttgtttacatcaagtacaaaaggttccaattctcattcctgataaggaaccaaaaattcaaagttctttgctgattggtgatgcgcattacagggaaggaatcatccatttttaatggaaaaggcacaaagcttagtctcatcaataaagttttaatttcttactagttatttgaagctttgccttgattccagaaataatcatgattcttaaatagagggtaaaatgttttctgtctcgcttgtatacgcgttcacctcatcggctcatctgcagacctacagctaccaaatccttattatcagatgtgatacatcacactggcttcctaatagaaactccattactctgaatcgggggggggggggggatcaactcttttttcttttcagaaaccttgacaagttgagagggggtaaaggggatctcaattcgctaagggtgagaaccaatcccaagacctcttgaaaccgggagagatgctctaaccaccgagtcatccgtcactctcatgcatatatacatatctttctttcttctttaggcagttttcctgggagcctaaatctttctaaagcaagtcataattttacaattgagcatatactactgtagataccacttatcgacacatttggtgtcatcaactccccacctagtgttgcaaggaatatcatcacttggatatgtggaaagcataagtgcagaaaagtaggtctaataataaattatcaactatagttgaatacttaatgaacacaatgattattttatataatggcccaaacaaaaaaagtttactttcctcttttaatttttaccatatgttacttagagatggggtaatagtgtccaagtgttgtcatggctgaaaattttggacatggtaatgctggcctagaatttgataagggtgtgaggtccgacattcaaagattttattcataattgaaatagacttcacgagcttgtcatgttacaaacacgtaaaaatttcaggttgatttgtttgctaggtcttgttaaaattatggcctcaagcacatttatgagcatacatcacttacttttctcttttcttttcgtcacctttcttttctgcagatatgcaattcaagatgaaagtgataggtaatgatttcatacccttatcggagtgctaagtgttttaagagtcggaaaaaaaacatcacgactcccaaggcccacgtagattagttcgaacatttgtcgaggcacaaagatcaaatataagttttcattaggtgatttattgttatttcaaaagaaaagtcggtgtgataagagataggatctttgtaatgctagttcaaagaaagtagatgtgtaatgagataacgagttcaaaatgggagttaaaaaatagtaagaccatgccaaacaaaaaggaagtgttcaaactgttatgggactgcatcactaaaatggttaataatctacaacgaatttatacatatatttgcaaggaacacgccaatgtatctcttttgcttccattttaacacatatttaaggataaagtgtcgttaccatggatataggtagagaaatgcccttacaagttacaagattacatgcaaattccttatcactatcaacaaacaaacaataaatttattatgtatgtaccaaataaaattaatgatgatccacaatttagatcgataaattcaattgtgaatttgctcactgatgaacaaacttttggcaaccctgtcccctacccacaagctacacaaacaagggcaaaatatttcccatgacaatccaacattccaagaagattgtggctgatttggtgagcatctattattagaaactttaagcatatgaaacagatttatatcttctgatctgttagctattaacacagacaatttgctatctcagataaaattaatttattaattattgtttttgaaattacagttacataatatgatatctgaaaactatagttactgaaatggcattatttaagaagcaaagatacacaggcaaagcaaaaggctcatagagtacatcagaaaaagtttcaaacaccataagctacagccttaagtattatgcagcggaataaaaaaaatccaaaatcctagatgaaatgaaaggatttcttcaaacataaataggatgatttccagatatttacctcgccataactggagtagcaccattgcaaaagtgcacttctcattgtttcttggtcatgtgccaatttctccaactcttgcttccttgaatcttgtgtttctgggtcatgttcaaaatctcgaatctgaattgcatttaagtataggagaaatgaggaaacccgaaactttccctagttaaagagaaatttaaccttgcttttgtgtaaattaacatgctcagggaattatatttccattcttgaccgacgaagagaaggttaatgaagttctaaccaggaaaaacaggtgaaaaggaaaaaacataagaagtgggagctgaagcacctgaaaacctctttcacgagcttttactctgaagttatcagcaacacggctaaacatagtaacagtgtacagggcgtattcattgtcctcatacagctttttagatgaccttgggacctgaaaaggctcaatttaagtgcccataacctagtaaggtaaggaaaaatattggctagtaggaaaaggatataaaataaatattgtaccactagatattatttctagcatgaatcacaataaataagtgcacctaacctatgaagagagtataatatatatgtagtccttaccacatagtcagtcaatgtctcatagcttgataaccagtccttttgtgagaacttggaaacaactgacaggagcgtaaccaaatgctctgatgcaacaacatcctctggctttaccaagttggagagatctctcaccgctaagctgagatgatcaaaagcttgtcagcagacaatatgaccaacagttttctaaagccagagagcaataacaagcttgactggacctttaccttccactttgtttgcggtttattgcattaagttgactgcgcacattgttatactcagcaacacggacctaccaaaagtaaagtttcagactcaaacaatcgcttggaacagtaatcatactaaaactagtatcagcatatcagtcaatgtgttaagagatttccaagatcagctaacagctgatagccatgaatatctcctatagtttcttattttatacttcacatgaataatttggtttgtaaaatattgtgcttattaatcattatttccatcagcactgatataacagagttagtatccatgtcttaccttattaggttcagataaattttggtaaagaaaccaagcaccagatggatctaattcaacgtactctattcatgggaaagggtagaaagctgcatatttaaaataaaaatcctgctaagtgctatgtaactccggaagttcaataattaaaggaagtcgtaaaaaagttaaggtctgtgaggccaagctttagtttttaaaaaacaggttctctgaacattatttgaggagaattatgggatatacggtgatcttcttgcagaagtatgaatagactaaagaaaataaaagatagctgaactttatgagcacggcatgggtgaaatacttgtggtagtgaacaagacacggaaggcaaaaagattatttagaaaggactagacagcacaatcgaaggcctgaacgacgattagagatctattctgaatctgtccaccttcaggattgcaaccactcaaaatgctagtattttagcaacaattgctcttttaccagactaaaactttatgttaattttgttatgcaaccacaaagacgtgaatcacaaagtgtaggatggcaatcttaaatcttttatcaatagcttagttgcatatcttcgcatgctttcagagttagaatttcggtatcaaatacaatctcaaaggtaacagtaaaaacagcaaccctataccttgaggtcatcttcaaccttagccacaaaactatgaattccatcaactacttccttcaaaggcgacatagtcggatattttgcttcatcccaaacaaatctaccaaataaaaaaaacacaaacaaaatcacaaacagaactcaaaattcatagtcaaacagtcaaaattcagatccttcaaaagacctcaccttgtaagataagagtcaattggaactccatcaactgtcaaagcaccaccatcaacgcctgaagatctctccaattcatcgatctgacgcctgatcttatgcgtcacaccttccacgaatgcattcgcctacaaaatcatccaacaattcagcctaaaaacatcctattcgattacacattgtcgaaaaaagtgcttaaaatcaaacaattataccctgagaagttcatcagcaagtgcgaggagcgaatctagggtaccaacacgaagattaggcacattgaactgcaaaattaaggaaattgacatcaatttgataaagaaaataacataaatctcgcaaaaacctaatttataaatcttgccaaaatctaaaagaggagagagaagagagatactcggtagagaggagtatcgaaggattgtttggagacggattcttgcaattgagaccataaattagacgcagatgattgcacgggaagagacaccatccagtatctcgtcgccattgtcgatcgctatttttctctctattctgtgttgtactgttgttgttgtgttgtataaggagggagaggagagatcaaagtcgagactcgagagtgatgaggtagatgacacagagctggaaaagtaggagatgcaaacacgacaaacttgtaccaatgatcaactatttaatagtagcattatttaccctctatgcgtttgtgttatattaaactttttttttcatttaattattaattagtgttataattttttttttgaataaatatttataattatttttatatgtttatcttaaattaatggttcgtttgttttattagttatttgttcatcattatccaaatatagtattgaaagaaaataaatatagagcagaaaaaagattgtgctcaaataaaatcgaaaaatttgtataccgggttcaatcgttgaatattaataaagtggaagagtttaatttatataatacaaattaactgccttgtttttggtatgttgttggacgggcttgaatagtgcccgggaggcgggcggtcatgaacaatgctttcgtttttcatgattttcggtaatttttccgtttttgagatattttctaaattaattgacgactattgatcatattaatttagaattttcttgaggttattaggattctatgtcctaattaaaggaccctattggtggttaaaacttctaagcttagctttttataagattgcttgtaattagagatgacaattatccatgggtgagtggattattcacccacccgcctcgaataaatgggtgatcacccgcagtgaagcgggtgactaacgagtggtggatggatcgggtggcaggtcaggtcggttatggatgatattttttggatccatcacctgccccatccatccattgatatatatattaaaaaaaattattttttgtactgccacgtgtcatttaaagtaattaaaaaatacttaaatgtttgttaagggataaaaagaatacttacaattacttttcggtgtgtaataagattaatattttgtcactttattgttaatctatgagactatgattaattttttatatattaatttctttaaaattgctaggtctaaaaaataatttttgttcctagtatcacccgtttcccatctgctccacccgccctacctgcgaatgatgggtggagcggatatgggtgaagtttttggcgggtgatggatggtgtggatggaattttgggtcgcggttgatggggcggatggagctccacccgatccatctccgatttattgacatccctacttgtaatcctctaggtatctccattaaagactattgaaaagttctcgaatcccccacctgtggactaggtcacatttaccgaaccacgtaaatccttgtgtattatgttcatcttctttattactttctcccttatattttattgttgactattgttccacattaaatcgaatacaacaatgtcctaatacttaacaataggtatcaaaggtagattttagggtgttcatagaaagtttaagtttttttttaacatgtcaacaatgaaattcgatattgagaagtttaataggtaagtgaattttggcctttgaaaattgaagatgaaagccatcttagttcaaggtggttgtcacaaggttgttgacggtgtgtccaaaaagggcactgctatttcagtggagaagtgggaggatataaatttgaaggctctatctacaattcaactgtctctctccagtgaaattttgagaaaagttactcaggagactactacaacaggtttatggttaaagttggagtcactttatatgactaaaagtatcaccaatcatctactactcaaaagtagacatcaagatctttgcttagaagaaggcaaaccgctcgagtctcatttagacgagttcttcaataattaaggatctgcaaaatattgatcataagatcgatactagggatatggctattaggttgttatgtctttaccaccttcttataagcatcttagtgagaccctattatatggtaaggatgatttaagtttggatgatgttagggatttcttaactcaaagagatttgattgataataagtaaattgctaaatctagcagtccatctcaaatagggatggcaattaggcggggcgggtgcggaggatggtacccccacatccgcacccgcattaaattctcatccccatccccgccccaccacccattgcagggaaagattccatccccatccccgccccaccacccattgcggggggaaattctagacccatccccgccccacctccgcacccgcgtcgtacacgcgtcatacccacttcatccccgcaaaaaatccaccaaaaaatctgctataagcccattatagttgtttacttcacaaaatcacaatataatatagtaaaagaaaagttaaaatacattaataaaggcaaatgttctattacatttcaaaagtgtcttcaaatacgttaataatatatgtatataaatagaattttaataataattatgcgagggtggggcggggagggcgggggtggggcggggcgggcgagaatggggcgggtataacataaaatccacacccgctccactacccattgcgggtacaattttaatcctcatccctgcccattctcgccccaattgggcggggatggggcgggtctcctacttgacctgccccactgccatcccaattttaataataattatgcgagggtggggcggggagggcgggggtggggcggggagggcgagaatggggcgggtataacataaaatccacacccgctccactacccattgcgggtacaattttaatcctcatccctacccattctcgccccaattgggcggggatggggcgggtctcctacttgacccgccccactgccatccctaatctcaatctgatgctttattggttcgtggctggtggtgagaataacaaagggaaaatttgtaactattgtcgtgtaaagaggcatatcaaatatgagtgttggaagttattgaagaataaaaatgatggtaaagtctgctactgcaaagttcgttgacacaaatcttgatgatgatggtgcactttccagttacaacatttgtggactgtggtttctaccaatcacttctttctttttttttcttgacaacaagtacatacaagcaactaaacaaaagactaagggcctgttctccccagcttattttcgattggttcggttggttcaattcagtttaattggttcatatcgttgattcgattgagacggttgattcggttcaagttcggctcttgacaatacttttactctcacatatcactattcatttcgattcgattcagttcaattgattcggttcgaatcgatcgattcgttgattcattcaattgattcgattcgattcagttgttttgtgccgaagagaacaggccctaaacattcaatttagaggttgaaccaactaatgaattttgttacttgagggggaaggggaggtaacatatcgggggagtccattaccaccaagtaatggtaatatattggtgagaggttgaaccaaacatggcgaaagaaaaccggtaattaattccatttcttggaacctaaaaatagtgaactaaacgggctctaataagtaacctcataatctaatccattaataagtgacctcatgagtcctgagtaaaaggttaaatacaaaaattaagcaagaatcacaattatgtgacaatcaactaagagaataccgacttattttatactacaacactcctggaaaaagaagacttgttttgtgttagactttcatacgaccccttttcttccttctcaatctattttgctataacgtttttaatacctattagtttgttggactggaaaatcctctatggacgttcttttaatcatcggatgtatgtgtttggtctatgtggacgatcttataatttatggcaatggttctgcggctatttccttgttcaaagcctatatgagtgactgtttcaagatgaaggacttgggttctctcaagtacttcttgggcattgagatgaaccgtagtgcttctggtttgtttctttgtcaacagaagtacactcttgatattatttctgaggttgatttattaggtgccaagtcttgtggcttccccatggagcagaatcatcgtcttagtcatgatactagcgccttatttgatgagccggaccggtatcgtcgccttgttggtcgtctcatttatcttgcggttactcgacccgaccttgcttattcggttcacattctatcccagttccttcaggctcctcacattgctcattgggatgccgccatgcgtgttgttcgttacttgaagggtacaccaggtcacggtattttacttagtgccgataatgatctcacactgcagggttggtgtgactctgattgggctgcttgtctcatcacgcggcgttccttgattgggtggctagttttcttgggggattctcccatatcttggaagataaagaagcatcacattgtttccttgtcttttgctgaggctgagtatcgatcgatgacaactattacctgtgagctcaaggggctcttacttagtgttggggttcatcatcccaaggcaattccccttttctgtgacaaccagtccgctcttcatatcgctcacaatcatgtgtttcatgagcgtacaaagcatattgaggttgactgttattttgttcatgatgccatcaaggatgttttactagctccgtcctatgttcctaccacagcacaattggccaatgttttcactaaggctcttggcaagtcacagtttgatcttctcatatccaagttgggcatttgttcaccgcatgctccaacttgaggggggtgttagagatatctttggtatcttgagatactcttgtatatattcttttctatcttttagggaagttatttgatcctccttgattcatgtttagaggattctttcctatcttttagggaagttatgtgattgtgaatgagaagaattcaagctttgttgtgcctttatcattttgtcaattttacatacaaacatatcataaaaaccattgcaacatcaaatccagctaaaaaacttgaaattttcacaaacccaaaagccaaaataacataaaaatgtcaaatttgtttcataatcttcaaaatcataccttaaaatcaatgtctggataattgttagcaagagaacgagcaagacgttcactagtctcctaactattgacccgagcaacccaccatcgtgagcccaattgggccaatttatcaagatcgagctctttaatccaagaagcatatttttagaaatataacgacacttttaatttgaatcggcttattcagaagatacaaacattattagggacacatttaataaaataagagtataattttgtgcttatcgaccaaacttttgtttttttttttttttggtattggattttgtcatagcaggttgatcaagtatgatctagtaactttgtacaatctagccacctcaaaaatctagttcttatagtctactggctaaatagtattgtgccattaatgttagcttacattagagatgatcaacatgggcacgacctgaaaatgggtgggttttggacacactttttcggcctgtggtttggaccctatttgtaaattagaggtatccaacagatcacgagcaaaggcttgttcaactcgtgctcgctaagtttcgagtcaagttgagctgctcatgagcagctttagagttacggttcacctatttttaggcatttgattattatattttcttttttttttttacattttcacttttatactagatcgatatacttttattgagtgttaatgtaatactttatttcaaagagaaattaattgaaaacaattgagttgcgtgcaagattattgagttcccagctcaatcgagcgagctcagtcaagttcgagctgctaaactcgattagcacccctaagtccatcaacgaaatatcaattaataaccagtgcatcaaaaccaattgaaaaaaagtttcactcaaaaagcaacattccgattcaccgaaatttaaccatatccatacaaaatttagtattacaagtaaataaaatttatgtatatttgctggaaaattccccaatatatacccccctatgatgaataaaactggagttatcaggctatcaattatcatctctcaataacctcacaaatccagggtaatagctgtaagagttaacttggttgcaaatatcagcaaaggctagaaatttcctgcagtaaaaacagaggggaagagaaaaatgacgaggtgtgttaaagggatgtgtaacaagtaactaaaatggcatataagcttttgtttctatatttcttggtcgaaattccaatctgatacttccacaccccaacctcagttggacaaccatttacaaatactgtgagatgagccaggtaatgatcccggtcgatacaaataaaaatacataaagctaagaaattagcaatagaggatacatttgaatacagattcactagaaaattcaaattatcaagatatctcttctagtcttatctgacgcgggccaggaatagtctgagattccgtgctttctgagcctgttcaggtgttatttccatgtccgaatcactcagatcaataatatttactagttctacattaccttgacacttggagatgtaccgtgtctttagtcttggggacgggcttacgagatcaatcacatccgtatccatactcatgggacaatctaaatggtgatctgaagtggatttgttattaatgttgctggcgtaatcttcggtgtcagaaattgttaaatcaacttcaacgctgcttcctgatgctgatgagctagagcatgatgttgatttgcaccttgcattgtcctcagactcgacgttaagttggtgatcaaaaggggatttgttgttaacgtcgcttacataattatcattctcagaaactgttaagtcaacttcaaagctgcttcctgctgctgacaagctagagcttgaggttggtttgcatcttgtattgtcctctgactcgaggttaagtaatgggctttcagttctcaaatcaacactaataacggaagcttgggttggcttgaatcttgaattgttctcctcatactcaatgtcaagtaacaggttttggagtcttgtatcaacattagccacggaagctgtgtcatctaatttctttgacctgggtttacgacgattctgtttctttatctgaactttcctttcctcaaattctgcaatcttctcaggacaagcactgtaagaaatgtgatagtcattctgtcagctaaacatggattaccttagaacacaatgagtgtaatcaatacatacttagagggtgtttggtatggaaaacgtaaacggaatggaaaggatttggataagttggggaaatggaaataataaccgttacctttaattgttgtttggtatcttagtggaatggaaacaattgagaggattatgattgaggaaggaaacgtgatttgtttccactagtttgataagggtaacaaatgggggggattatgtttccccttggaaacggtatttgttacttaacactcataccaaacaattagaaatgaaaacacttatttgaatccgtttccctacatcaaagattttcataccaaacaccctcttatttcctgcatatatgcttcagagagcatgcctttctcagaaagtaccatatagattaataaaataataagccaatgcaacccatgatactatgcaactgaacatagtctgtaagtacgcaaaatcccttactgctaaaggggagctaccctaatatgctcttaccttaccttcgttaagaaaaaaataaacaaattcccaaacgacagcatcctaaaagtattaagaaaattatactctctccgcaggagagatttatagccacgtcgtccaactccttgcgagttcagaattcacgatatgacagaattaaactttataatatttgtctaatttcttatcagttcttcatcaattaatttaagtagtggcatataagaaacttaatcataaaccattactacagaaaatgtgacaactttttctaaacattcttaaataattaaagtatatgtggcgacagggggagtataatctatgaagtatcatctcacaacatcctacatctatgaagtctacagacgatgcaatccaattattcctgtgctaaagaaagggaatctgctctgaccctggtaggaatttacacatttacagttatttcaacaggcaggtagaatttaaaaattatggaactataattacctctccaaaagatcagctggtactatggatgttttaaggccatcaaattcttcccatgaaacttcaaagcattctctaccttgaacttttctatgcttgagaacttcagatataggacatctttttggcatctgtcattgagaaaaaaagaagaaagaatttaatgacactatgacgctaacgcatgatttgtctataaggggaaatcttagcgactccttctgcaggtagtcatgagcttcctgcatcacactcttcagatgtgtaatattattgatgccaggtagagtttaaaacagaaggaattttagattcacagtcttccaagtatttaggcttgcaccagacggcacaagatcccactaatatcggcattagaaaacagtttgtcttttaatttcgattgaaactcttcatctgattatatttccacagtgccgcttggtcaatgtcttctatgtataatgccctatattattttttcttttaattttgattttgaaattcttcatctggttatatttccatagtgacgcttggtcaacatcttctatgtatgatgccctacggaatttttactacttcacctattacaatcataattgtcgaattaaggggtcgtgtggtggtctcctcacatgaattttgctaaacttatgtgaacttgttggaaattggaaatgattcgaacttattgaagcttattatataacttattagaacttattggaaatatttgaaattatctgaactaattatctcaaacctcataatatctcaaattatctaaattactgaaacatgatatctcaacaaaaagctttttgaagtgagagtgggactttggagagggaattaccagttcctcactaagtactttacaaaaagaatcaacgaacaaattatcaccaaagggcaaagagagcttaccatgtgcaatggaagtgtaactcctaactgtgaagaagacaaacgcaaattggcatatctccgcagctctctttcagcaatcttaggaaggatgtactcatctgaaattggttcaacagaagtataatctcaacagagcttgcacaccagttttctataagatctagagacaaatatgagacaacaaattacaagtaaccactttccttgaacattaaaattaaaagttcaaaagagcaggaaattttggcaacttctcaaaagaagtccacgcaaagggctgttggcgtactagtttttacagaatgctgaatgagttcctctgtttttaattgtttctaccatattggctttcacgtttaccattaatatctttgaaatccactagtacaaaactacgaattatggaaaggcaaacattaatacacaatgagactaattcagtcacatttgacatgataacatttctttttatatattattaaacaatatggtcaaagtgcgttatgtgagtagtgcaacacttcaatacggtagaactcgaaaataaacagaaatagtataccactaattatttgagttactgaccccattaatatatatatgagagggggagaatattagataattagactatttagtattcccgacaatgatacacccccagttaggaaaccttaattttatcatgatgataattcttcccaaattcataacagattgcacctataatctctgagtctggatttgatctggccaatatatctgactataaaacaattgctctagctacacattacaagaatgcttgattgataatgatggaaatcttgggatttcaagtctttaaacagtatatctctagtcaaatcaccacttctaaagtgatataccaacaaatgcatcttaatgcttacattcaccaaacacataaatttttagacatttaattaaagcaaacaaagacactatcacactactaatctaagtgatactgctatactgatttagggaggaattgggaagacaggggaggggcagggggagggggagaaaaaatggtactgctgaacttatttgcatgatctattgccatagcaaaaacctgttttctctggaggccaatcaaagaactgagagcatatttgctgaagcgcatcacgctgaaaaggaagcacagctagaaccctgaaaacatacaagcaacataattatcttctggtcttgcattcaaaaaacaccttaagacacacaggaggcgtgcaacagatgaatagacaaaagcaggtcaatcggcgaacatgctagtacaggcaatatagcaaaagtgtgtgtacttttgtgtaccaaacatccatgccacaaaaacagcaacaaggcatatcttgtagcagaaaaatagaggcgttacctatacacaggatctgagtcagctgaatgacacttcggcttcatatatgcttcaattactgacaagacttccttatctttgtccaaaggaagctgatgttctgagggaaaagaatcaaaaaagttcttcatggatttttcacatgtttattgcaccacaaacattacagttatggaaaaaagatacatcaactaagactttgacagacacgtcaaaagtaccgattacaaaatgccatgacaaaattatatagccgaaagtgacctagaacagataggcctgtattccacacacatatatatattaagcatgcaatggtcaagtttaaatgtcaatttgacccaccagtaaactttacttgttgatctgcaaaattttctttcccaaggcactcaggatactgtccatgcttcttcgaagttttcaatgacttcaaaaaagataaaccatctgatgcaacatgttgaagaacaagattttcgctaattgatctaacaacttggcatgctgaatcctgtaaccaagtgaaggcaatggaaccttaaggcctcataacttgaaataaataatagttatcactgctctaccttcaaaaaagcagaataaggtatccggacttactggtccaaacccgcgaactccatgagaataatcacttcccaagagaagggctagggcaacctggaatgtacaactaagttatcaactatagccacactactcaatcagataactgatgtccgagcataaagaaacaactcaccagtgaacgccttccaagtccaagtttgttctctatgtcagtcatttcgtagcaaacaacgtaccctcctttttctattagtcaattgaaagcattaatgttgttgtaaaaacagcttctgagtgattatataaagaaaaaatcaattaaatcactcaccaaggcatatgtctctatacacagttcttgctccaaaaaggaacacatctgaatcagaagtgaaacatccatcctgtaatgatataggaaactcagctttatagcaattaaaattgcccttcgtccgcacgaaatgacagaattttccttttagtacaaactacaaatatcttatagagctagtgacacaattgggaaaacatatccactcttatcgagtgacagcatatatcgaaaacactctctagttagcaaagagaatgcaagtattagagaaaaatcattttacatgcggagcctcctgagtaacacacaaatcatactatgatttgggttgtggggccagctagcacgcaacaggaatcaaacttgtctttgggtactcatagaccacgaataaaatacaccccacttaactagaggtctaaagacaataagacatgcctaaaggggggctacttctagaaaatatttcattctagcaatttgccttttcttcatagacttaatattaaggcaactaaaaaatactcatgatggcttctcttataataagttatgaaaaatatcataaggacacgaaggaagtatcaccagaacacaaaagcaaggaaaaggattaaaaagaaagataactcttatactcgccccaacatagtggggagcaagaaacatcatgaactcaggctaagcaaatcataaattatcaaatccaaacaaaaacctcatcaaaccaacttgatatgaagatctcgaacattgtatcctaatatatcgatttctccttcatactccaccaaattgccaaaggaggtcgcctccatatttcaataattcaattatctttcaaccttctcgtttatgctactgaaacatttttaacattgcttgagttatccagataaagaaattttgaatgccacaaagaaagaagattattggttgacggcatattatgttagcaaaggattcccctagtagcaacatgaagtacattaatttagtcttctatggggtctccctaattatcatagctcaagtaccaaaagtccaaaactgcacatcaaaaggagccttagacctcacaatgtttttgacaagacaaaaaatccacaacccattcaaacatgatgtgaaactgtttaagtcaaaggatcaaccacaatcacttaatggaaacatagaatcaccctgagctcaacatttatctcaaagacatggaaaaaactgggctttcaggattggaaacatttacggagaaacctaggaaacagagtttttagtgctttatagttgagatatacaactttctatatatacatgctaccatgtcttaacaactggaaatatcaaatgttatatccaccttcaaagaaagtgagacacctgtaatggaaacttacatgatcgaaaggatgaaaaaggaagatagtcttcatcccttatttcctattctaccctttcacttctttcacatgcaactaacagttactcagccatatgaacctcacatgtattatgcatctttcaaatccctctagtggtaattaaaactaaaagcagaaagtaatagatatgttgcacatggcaaagggtagtttcagtttccaataaatagaaaaacaatcataaataagtgaagcttgaaatatctgctagaatggaagtggtgaagcatatacaaagaagaaaaaggtatactactcacacataatgattctgagtttagtaaagcacattgggcttcagcttcctcaatcctgaaacacatacaaaaggtgaagtctcaaactttacaaccaagtctaccatcttttatatcagacctaaccatatgacattgtctcacaatcgttccttagacttaaagatttagtctacaaatgttggggtgggagtcgaacatatgctagagatgacaaaatgtaacatacggtctcagataattcataacttcaatcttttttctgtaatttgctgagcactagaaatcactccatataattatagaaacacatcagtatcttaattcttgaattttaatacatgaaaaagagggagaagagaaaaaatagtgttaaaatctagtagtagaaggctgtctgttagccagcttaatactagctgaactactaaaactcactgttaaagctgaaatcagaagaagaaataaacattacccatccaagcaaggaacaccaagcgccatgccaagggttttagcctctctaatcatacaagagaattcagaacccatatttcttcgcaagggaacaagtttgtgtttatctacatcatcttgtgtaacctatcttgattcaaaatgttgaggagaatcaatgacagtattttctctttgctaaattctaaacaaaaagagagagatcaaagtacatgatatctacctcatttactgagtttaagcgctttctgtatgtcgaaatcttgatagcagggatagatccatctattatacaacaaataaaatacaaattaagctaatcctgaaaccagtccttgatgagttcgaatcattttttaagctttaaatcaattagtagtacatgagtagatcaacaaaaagtactaaccctataattcctttcaagtcttaatgctactacaaatctggaaaataatataaggctataaagagaacacaccagttacaaaaataacactacagttcaacgaaatgagagccctcaatcgatgaaaaagtcccctaaggtaaagcttctctttcattgcacagtatgttctattaaccttttggagctgcaccatccaacatgagaggtctatgcacaccctcttgttcctgtaaacccaatgttcaacaaatatgcatcaaaactttttaatgacctgataaacactaaattcaacatagatacttgtatatatagcatgaaactacacttcttttggacccaaatgaagcacaatatagcccaaataaaaggaaaaaaaaagactttgactaaaaaccatacaaatttaatcatggtagaattataataaatccataattataggaggataatcaagcagttagtgccactacaatatcaagaaattgctgttgtacataggtaattggaaattattcacaattaccagtcaacccaacatgatttatttattaacaaataaaccttcagcacaaacagaaatagatgaaaattatcaacaaaattgaacttaattatcccagatttagcacaaatgaatacaaaaaaattaatggaaactggaaaatgattaactaacaataaagtttgcccaattatgcaccaattaagtttctactaaaaataaattaaacaggagaggaggaaaaaaacaagaaaaaaggaactatctttataccatacaaaaaaaaaaagttaactaaagatcaaaatggggaataacaagcaataaaagcaagattaaaaaagaagggagaactcactgaagatggtgaagtggtaaagttttcttgcaaggctccaagatatcccacaaatttttgacacccataaattctgctttctttcactcactaaaatatggtgaaaaatcagagaaaacagtgattagaggagagagaaaagatgaagaaaacaaacgttgggggtttgaatttggtatccgtttatttatgtttcaaaatatttatggcttgattactgaaccgaccggttcaaacatttgaccacctttgggtttattttgctgcctcattatgccattgcgatggccaacagttctggccaatctaactcattcagcccagcttgtttcttgggccatgtaacttgagtccgcgaaaagcccagtccaacccaactcgaactgtaaaattggtgggtggtttgtaggccaaatttattgagcccaacccacaaaagcccgttactaaaatggtccaatccggtccgcgaaactggtccaacacggctcatgaactggactaggccagtccaagtaattattcaaccaaattgtatatattttaatcaaattatatatattttaatcaaattgcatagatcataatacaatcaaattcaaaaatatgaaattattcattaatattaataattgtatctattttaatttattttaagggttttatgtaacaataatatacataagtgctatatacagttaaaaaaaaaggctaaatacagcatttaaaattatgtctaacttaatcatggttaattttattattttttattataattgggcttcaactagaagtcgctttaataaataataataacagcagttcggtgagtatacaactgtttaaatttcaaatttattgtcatatattatttaaagtggtaggtcatattttatattttccgggttgcgattatatgtactataatagggtcatttatcatagatgacccgtataaggggggtcatttgtaatagatgatccccccaaagcggggtcatttgtcacaaatgacctcccaatgggtaggttagtcttttaatattttttgttgtatttagcctttttttgttgtatatagcacaccccataataaatgattccaatgattcaacaagtttgaaaaaaaaatcttatgtcgacctgccagcacactaagcccacgaaccgctttctcaaatcgtgaaaacctgtaacaggccggtgtgggccagaatttttcagctcatggacaagcccgtccaaaccgtgtatttaacgatccgatcctaggccatgaaatctcagcacgacccactacggcccacggaccatcccacccaacctacaccagtggccatctggggcattgctaattactagtacttccaagatgatctagaagtattttttttaggtttattctacatagtactctacattttatgataaattacaatttctagcctttttagatttttcacattatacccctaaactttctaaacattacacctaatactcttacattaaatactaagcaatagattttggaattttttttaccatatgggtaggataagattgttgagccattttagttaactggaattttgggggtataaatgtataattcttaaggattgaaggttgagtggggtttggggtatgctttttcattagtaaagatattttgtgtgacgtataaacaatttaagggtaaaaaatgaaaagttcaaaacacaaggacaatacataaaaaacgcttttttagatgtcatgttggaacctattcaatttgtataggttctatcattttagtattttattatttactaattgcactaaaaaatttaaaaaagacaaaaaatattgcaactaagctcccaagaaatattagccaattcgaagtacacaaaatatggaaagatgagggaagaaaagatgaaacacgttgtttgatgttcatttccgctaatatagttcaattagagtatgcgactatgctcatttatgtctcaaaaaaacatttcattttttttctcataaactttgtctctcatcttaaaaagttgatcatgctttatatccggttttgacaaatgcactccattcataacccaaaaaataattaatttcgtaagtgtgtcaaaatataacaaaatgaatgtctatttataaataaaaaaaatgacaattggcgaattttttttttagatttgtaattttgaagttattcaaatacaaagtctgaatatcaaaacaaatcaatctgacgacccagccacatgtcgacatatgatttgattgggacgctgctctgtgcactcacaactggctagaggtgatcatgactcatgagtcgggtcgagcgttggccaaaaaaagtggtccgtttcgtgacaaagttgtaggccgggccaagcttccgatattttgggccggtctagcgagcttttcgagccattttgaaagaaagataagaatgttttggaatctttgtgtaaaattgaggataacttaatccaaataaatcgacaaaaaataaagtaggtacaatattttaatatacccaaaataaaatgtaagcactatattataaaacatatggagtaattaaataaaaacacaaggagtaagaaagataacatcggtgaattttggacaattttggtctacttttttttctagagagagaggctctgcctgctctctagaaaaaaaaccccttagctccctcaaaagaaaaccctaaaccctagcccccaaatcaatttctttataatttgaaaccctagcctcctctttcttctcttcctcatagatctagtcattgttatggcttagctttgtctactagcccaattttccttgtcctcagtcggactcttggttttctagcctcttgattagctttcgccagttctaaaatcagtcaatttgggaatggttgttcgcggtgtgggttcaattcgtttgtggtggttcgtgagtgttcacatcgccggtgtttctttcgtctccgtggttggcgccgattcaaagtatggtggtctctttgagaaggttttggagctatctcaatttttgtggtgtttgtctttccccccgtgacgggtttcactcgattcgacctggggtgaaggtgttagccgcggcggagcttccacaagtgttcctttgtgctcctttttcttcttcccgtttaccttgctgtttgtatgttgtatcttgtaaccatccttcgagatgtttagggggtgtctcttgttgtagacacctcctaactttatctcctaataaaaaaaaaaaaaatcggtgaattttggactcatggacttatagactcattgttcttttgaacatgtcgtactttagatattttgttcaaagtgtatttgttgatgcattagatattttatccacacacgtatcctttatgacgcttttctctctcctcctttctttcataatttctgtaacacatctgtcattgaggtattagctttatctctcctcttcctttgatttcattcgaatttgataataattacttattcaaactctttcaaataatttgatgtaatatgattatatttgttggattttctgcaattattgcttcattcctccattctcaagcctcttcttgccagttcttgctgtcaaactcttcaacttgatttcatttgcttagttttttaatatttatctcttgaaatatttaattttatttacataataggaaacaaaaatcacataagaaaatgttggaaaaataaaatggaaaaaaactctttaatttcttcaacgaaagaaaaaaaaaggcaaatgagaagcaccgtattgtgttgcaaaatactgtgtagaaaatagtattagttcattgatgaaggattgtcatgcggtggctagtccatcaataattgacgcggccgacgcaattaccaccacaaacagcacctccgccgcaacaaacactctcgacatcagaactactaattaccatcaatgggttcgttcttttatgtgttttctctcacctcaagtaaccccaagagattctggaatttcctccacattcattgagctcgagggagaaagaaggtgagattttcaggaatttcttgtattattaaaaaatatatatataaattgtgcaacacctaagtaaccccaagaggtgattttcgctttaaaagaactctcttcaacgctatacattataacgtttctcataagctacctaaacactatttaaaactctaaataatattccaacctctattatgtcaaatacttaattagtattttgacttggtcaaagctagttaaagagatggtatcgaacataagggtgttctgcgtgttcataaatatctgacctggttattccgattcgatttttcgggtgtccaatccgattttagtttttcggataggaatttttcatcttcgaatatccaaaacatcgaatttttcggactctcaaatttttgatccgaaatatccgttttcaagtcaggatgtccgaaatatcttatgatctaatctgatcagaaacttattttatgagtttttcttttgaattttttatttttttttggataaccgggtgatttgaaatttcgaacatccaatccgttcttatccaaaaaaattctaaactgattcagatcatatttttcccgaatctaaaaatatcaaatcggttttgaaataaacaccctagtcgaacaggtccataattaatcagttgacaatgttatcaaacaaaattctaagagttatgggcgagtttgatttacttgtgtctactttgtctttttatataaccatatgagccacaaaggcgatacaaaatacaaagaatgggaaaacgggattcgaacctgtgacctatcgttcacagcaccttaatcttaactactaggccaagacatccttggtacttgtgtctaatttgttaatattttttttttttgaaagaaaagggatttcattaatatttcgccaaacggcacttacaagtcatttctgaaaaacataaaattctaatagaaatacatatcaccctagaaatgtaaacatcgcagatttgacttaattttgccttaataaaaatcttcatctcaagcaatgcaatcgtgagttcgctctcggttcgcatatacgatctgcagatgcgaaaattttgggatgaacgtatctcaatagtcttccataattttacgtaagttgtgaaaccctaattcttcatgttgagtctcgaacttcaaccaatgagaataatttctcatacctaaaaacaaaagaaccatactcacaactcccataggaaagaaggagatttccaaaacagaaactaaaaaccccataaaagggtttgagaaaatttcataaagagatactaatttattgaacaaaacaagaaaatgaactaaaaactgataataaaagggaaaaaggggcttaccatggatgaaaacatccatggcagccccctaattgatgaagaaggggcaagggaggctagggttttaaagagagaaaaggagaggggaggctaggtttttttttgttaatatgagcaatataatgttcttgaatgatttcctacaatgttctttttgttcctcgattttttttttttatgttagtgtttctaataaatttcagtctctttaatggacagtttttctacccatatattgggttatatatatctatccatatattgggttatatatatctatccatatattggattaaatctactcatatgttaggttttatctctttccatgtgagagtttggagagtttatttttagtttttttatgtaatttaagaggttgatttgattgaattttgtgcggcgttgcaacagatgtcagtattttgtttacaatcagttgaatgaaatccaattctacttcaaaactgcaaaagatcaatagaccccctcgtagaaggctgcattagacaacaatgtgaaaaacaagagttttcagaaatgttagatctacctaacgatcgtggtttatttcattttgatatgtatgtgtttagttctgactttcattgtaagtgtcgtataactttgaatcaatgaattaattttaatttttaaaaaatttgctcaatgatcacattaagtacctattttataattataatgaaaagtcttaggtagaaagttaaaaaataaagcatatgttttttttttcaccatatacttgtaacaaatattttttagactatatattctttcgacttttgaaattcaccatatactcccccacttttcaaaaaatacattcacttatctttaatgactaacggcgttaaactcagttagtcattaactcctaaacctccctttaatcctaattaactaacctaatcctaatcctaactctaaaactaaccctaaccataacccctaatttaataccctaaccacccttcccggcccccaccctaactctaagtaaaccctaactctctatctccctaacccactcctagcccaccaacccccagccccaaccttaaccccaccagctccccaaccaccgcgtccccaccctccctcccccacctccacaacctcgccatccccatccctctcccacccccgcgcctccacccctttgattttcacaactctcacccccaccccactgattttcacacccaccacccatccccgtcgatttttgtgcccctcccctatccccgtcgatttgaacccgcgaccgccaaatttaccagattcataaaacactcagatgccgttcgttttggactgtaatccattgtcatcatcaacaccgttgatttcatcggattcccagtcctggaaaccgaaacgttcatgaaattccagccgttgggtacgaacatcgacgaggttggggtgtgagttgcgaaaatcgaaagggtgaagggacgagggtgggagaggggtgggggtgttgggatacaggggtgggggctggcgaggctgggggtgggggctcggtggttgaggttggggggctggtggcctgggggtaggttagggggaaagagagagttagggtttacttagggttagggttagggagggggatgtttagagtcagggtattagattaggggctaggattagatttaggttagttaattagggttaggagaaaatttatgggttaattactaacagagcttaacgtcgttagtaattaagggtaagtgaacatatccataaccttttaaaagtgggaaattttgccactattcaaaggaatagtgaaatgggtcacaaaagcatgaatttcactgtttataagcatgggcaaatctgagccttccatcaccgctacatctcaaccgcccgatttacttcttctcccttctcctttcgtggcacatgtatctctctcactcactcactcactcactctctctctctctctctctctctctctctctctctctctcccctttctagatctagaaaatttagggttttggctatggttgagcacgcagaaatcgaaggccaaatcaacgcttgagaagatcgcccaaaaaaatcaccaatgagactcatcttccaactccgattccgaattcgtcagtcagttaatagatcctctcaatcgttcgcggtcaaggcggaggagatgatgaggatgataacaagttttagagtgtattttgaattgtaagtaatatattttcattgaattcgatttttttttcggggtttggtgttgatgttgaatctataaatttgggaaaaaagctaattagattttctaatccactcttctcttccgaacttcccctcaaattaagaaaaaaaaactcgtgttctatttttgcttgcagactttcaaacctctactcacgagacagcacacaaatccaacgtttttctcaaagcgtggtagttttctctattttaatctttaatttcttccatattttcataaacgaaaccacaatttagacaatttcgagtttttgttgataaatttgaatttctgttaaatatatttgcgatttcatagggtttgttctcaagcgggtaaaggaagcatttctcaaccggaatgtatagtttgcctttgaagaaattacatggatactcataaatccgggtaagattagctttttgttggcgattttaagatgattttttttgttttggttgcttttgtttgttcttgtttaacgtgataatcgggttttttataagaaaaaaaatgtgtccagagcttttcttacgtatactactaaagatggaaaacatatcgggtgatctatattatttgttttgtatatgtgaaaacaatcttatgtgccctttggtttctagaaattgaggcgcgctttggttctttttactaagcaccactttacattctttctttcctgttttagtgttttcgacgaggttgtataactttgccttttttcctttttaaaattatgtacaggagaaaatttatatgagttgaattctaacacacattaatacccataatattcatgcaaccggtttgcacgttgacatcaagtatagtagtcgagttagccaaaggtttatttatcgatgctatcacctgttatggtgttctttctttaattttgccgctatctcggtaggtgtccatgtgttattaggaggtcattgatacattggctcaaaattttgcacgctttatgtgtcatcactttcttctcaactttttatagattactaaaaggaggatcattacatggttataatctcatcttatacatggatctaaattaggtctatagtacattcttctcttacttatgctatctcgcaaatagggtaacattcaagcaagatgtcttggatgaaactggagacatggctttcacatcatttagcaaagagtgtgagaaccctatgcaagctcctgtctgataaatttactcacagtgaaagacgtaagcattttcctttttgttacgatcttatttttattattagtattaaacaaggcaatgttttaatctttgtgcaatgaggtagtctacaacccgtatgttgtagcaaagaaacctatgataagcacaatgtatattatagttacagacatcatagatgcacctaagacaaacctccttaaatgcatgagcaaaatacattcagagaggaatagtcatattcaaatactggcttacgatagcttgtagaaaattgtcctattagagttagcccatcatgatgtaccaaagtggctctcaatgatttgcttcatgttccccgagtgtcggtacttctttgtgctatattttcaattttgcatactttaggagacgggttgtatagcaagtatctaaatcttttcttctatgcataagcgaagggataggctctatgttattttatgtcacatcatcaagtttgatggcattcattttgcgggttagcctattatattcatggattagggtctaaggataatgcacctcatgaatatcacataatttatgggtgttgattattaactctccatttttagttgatatgaagtaaaatcatacacttgggtaaagcatgaattacaattctttaggtttgggcataaccactatcaaatcaattgctcgtttgaatttaaattagttatactcattcatttaaaaaggtgttatgcttattatgttattccttcttttatcttcttatcatttcttctttctctttagatcttataatcttggctttttaagttggagaattgactttcttggccggaatccggcattgtgggttgttctatattcatatgtcactggatagaggcattgatattggtatgggttagagtgcaatcttggggtagggaaaaatttgaagacttcaaaacaatagataaaatgataatatctaatatagtagatactaatcatatgtattaaacaatttttcatttatttaaatacgtttttggtgggtaaacacagaaattaagctttcacagattagtgaaatgtccttcaatacaaaggcgtcttaataaacatgaccttttaaaagtggcaaaggtttctactattcaaatcaatagtgttttggatgataaaagcatgaaatttactattcctaagcaactgaacatcttagccctccaatcttcattcaatctcaacaatccgattattacttcagccatctccttcctctctgtttttctatacagtcgattctctctcttctttctctttgtttctctcactttttagggtttgatattgtgggcatcaatggcgaaaattaaggatagggatgaggatttcaagaatgagggtttgatattgtgggcactcacaatcaatgtccacatcctgttttagctcaagccaaatatctcaacgccgaaagcctacccgtcggtggtggtcaagaaggaaaagcaatcacacccataatttattccagcgaacgcttcaacgacgttgtttcccggttcacaggtacctcctctcccctccttttttttctccttttaccttctctttctctctcatttttcttctattttctcattttattccccattttttttctctccaaaaccagatctacttgctttgggttatgttttcagtcatttcatcatccacaatttcgctattctttccacattttctccccttaaattacggctccatatccggggttctattcaatttttcgctatattttctcttacaaccgggtttcagtttcttcttttacgggtttcgcttatgtgtctatgttggcccctttcacaaggttagatttaccatatctaattcacctcattcggtttctactatctcttccatgtttggattttgaattttttgttgttttggtcgaatttgtttgttgtggttgggctaaatggaagtgggaagaacaatataattgattttatgctctttttctttggtaagcgtgccaaacatgtagttccaaaaaaaattgaaccaatttcctgtaattttggtcgaaattaagtcaagatatcggtttgataatgatctttctattgaattgctcgattaaactgtttatgattttctctcgttttcttctttttagttgttttggggttgcccattatgctcaatcctcttaatccttttaatttgcaaagaatagagcttaagattgccacaacctaaattaagtattgtacttactttgtccgatttatgatcaaatctatcaatgtggcatggtaaacattaaataatggtagaaagtgattagtctttctctattttattaatttcgcagggtttttaggtttgggttcagaataatttggaagatatattttgcaatttcaacaatatttcttgaggctctaaatgatgggttgttcactttataaccctatctttgcttcacttttttactattgatagcgctttacttataaaagctattaaatcaccttggtcgttaattactcaaaatatatactaggtttagtacataagttaggcttttatcaccttggttgttaattactcaataattagtatcttatgtgttcctgaatatagggctttaatcatctgattttggtagtttgactggatttaaagtagctttaagatattttgatgctatgaatgtttgattttggtgttgttgtaatggttatcgttatccatgtaatctccatttatgttatgttcctcagtgacattgtattgcctttgatggatacaatgcttattttcatgtggcagttgcttaggctgtagtaacacttacttttacttgaatagtctgacctgattatcttgatagtttgttcttttttctcttttgatcaacttttaaatgtataaggggaaaaccagaaaaaaaaccttttccattgcacaataacatctgtttaggtcgatgaatgaggaataagataacccggctttataatgctttggaacacaaattagatgtcctacatagcacttcaacaatattaaaagttcaacaatgtatgcatcaacatccaaaagtatgtggacacccacacaaatgggaaaactacagtttgaagttcagtgttagccgagtcagccagaaacctttgatctcaacacaaactcagtttatataggaattctgctaatgaattaatacatgttgtaagcacgcaatgttcaactcatatctggtgtttatttgatcaggagatgtatttttttattttgtaaggttcaatgatacaaccatgtttgtcttgtaaaaacaggaaaaattgttgcaccagagctatacatggattttggggtctcaggcgccattcaacacttggcaggcatgagagactctaaaagtcattgtagcgtaaaaataaggacacgatgcccccatatttcggtaaggaaattagcttaatcatctttgtggcttttgccttggatgtatatgcctacttgtcataggtcatagtgatacacattatccttcttctacccactttgtttttttcgtttaatattcacccccatgctccgaaggccgaagggggatcacatccttcatttgtaagtcctccaactctatatgttgcgactttcaccattctaagatcaattttgcaccaactttaactgtatttttcacttataagttcaatatgtaagggagaaatgaaattacatgggatcatgttaggtctcttccaatgcatattttcaaatattgataattatgattttcattatatataaattaaatatattgtgtttcgagatcttcaaaaagcgaatgttgcaaatggatgggtgagacttctttgagagggatcatctttaataaaaacaaacatttggttttttgtctttcctgctattcaaaattgtaaaatccctttctttatgaaagtacaaactatgggtctgttttgaattatttgatgcctttcccgagaaagagttcatttaaacaataaataggcccattcgaagtacatgtttcacgaccttttcaccgcatataacaacttgaaatttgtatacatgtcttttttaaaaatgaatacgcattagtctagagtctattagaatccgagtatcctaattcgagcctagaacgccatcccaaggttctaacccgaaacctatggttaagctaaaacacctccttactaagctatgcatgagtattattaatattacattttctgtagttatggtggtcaaatttagtgtgtttgacgccttagaattgtgaaggtcgcaaaggcttatagttgttcattagttttgctttgtcgagttttgacccatttccaaaataaaggagaaattcaatatcgtcaatcataattttatccgaccttaatgaaggatgcacgcttatgtgaagtgggggtacaagtatagtatcatcgttcttgtaatcgtaaagcatctcctgtcttcaaaattgaaaattgcttcatctattaggtttttaagagagagcttgttctttgcggaagccctgtggaggcatggaaatgacactcatctccccattaatctaacttcatcgggtttgctcatacttgtccttttctaattttcattccacttcttatgccctcttaatttattttaattccaattttgcttaacaaatgtatcttataaatatggtacgaacccatataccacgtatggaacaaaatgcgagtacaatggtcgatttgtggtaaatttcatccttttctctcaaaatttgatcttttctgagtttgagactcgacccgataaacccgaattctttttaacaccgaaatttaccgtctaatttgaacttttgcgggtttgttgcaacttacatgatgatttgagttgcgagagctattccaattagagtgttagtagtggggaaaacaaaaaacggtctcgatgtgattcacttattgttgatgaatataaagataaacttcagcattattgtagtgctaaattgttgataatgtctttggtccgttctaattcgaaatatgcgcggtatattgttttttctttagattttagtttggcctttacggtttgcttcgtattttttctcgcttgatcgtaatcttttttccctaggcctcacttgttgtatttttgtttctaacaaatcgtaggggagcatctcatgatgttatacaacgagctaagacaacaaaagaagattgtaatgagcttgcagaagaaatctctttggtctagaaagttggaggaggtatacaacttgctaccttattgttcagcgatttcttagtgtgggaaattgatgcttttcttctgcatccacatctttcttctaggttttttcgttctattaatttatcatatttttactttgttttgtttgtgatgttttaatgtttaacttttattggatgttttgggtgtctcaattccgtggtagttaagaatataaagtttaataataataaaaatagctttgttttttcatcaagcacagaattacgatagaaatccggtctttcatagtttttttcatttctttgtcttcaatttgcggttactaaaacttaagcttgtcatagctagcttggaataggatgtcatcatgagaaactctaaaatcgaaggtcactccgagcaattagttgcaaaatcgatgttgtaatccatgatttccaagttcttcatctgattcagttgctatttggagtcctcaaccgattttcgttgcgttttgtttgcttttttggactaatttgtggtattcaattgttgttatgtatccacgtttaagtaacataggtgtgcgattttttgactaatttttttctaattacttttggattaattttgtttaatttcaatttaattaccatttttttgtttaatttaagctaaattctttcaaaattgggcgatatactagagttcgaattcagatgagttcgaatttgacatcgaatatgagtgattgccttagtccatattctcttgttattaagaaaattccacgaaaattataagctcatcacctttatacgcctgaagacatgtttcttgatagatagtagttgcaagaaatttaagcctcgatttggctatcatgtcgtggtacaactttttattctctgcattagtattacgatgttttttttcatgaaatttttattactcttgattctgtcagaatgaatctgaccccttcctatgtaccctctatatgtagtggataatttaagaagctagcatttttttggtggcagggttcgggggttagaatgtgaaaagtaatttcaccttcttcttcccaagaaatttgacctatcacaaaaatatggttaggtctatagctctgtaaagaaaatttgccttgggtgggattgatttcaaatctaaggtcaaatagaaacaaccacaagcaagtatggggaaggaaggagagcaaaaaacgatcaagatcaagggagggggagggagaggggaaggggggaagagtagtgagctaccattgggaagagcatttctttaacagtgtttgagcatgctattaaagtgttaacatcgttttctttcttttccttttttagtgtccctttagtctgctcacttacttaacgctgtaatattatgtttggatgttccatgaccgattaaaaagttctagaagtccgttcacttattgtcttcatttccctaattctattaaattatattcttggtgcattatcttcttttcttggattagctttgtttcctcttgctataggatcacttacacaatggggtttcttacttgatatttttgtcctgggtagttcggtgtgcaaagaattgacaatttcccgatctaaaggaacccgcacttgagttttttgagaccaagtctaatggcatgccgtgctatgtttaattataaaactttattgtctttttgcttgccaattttgcgatcttcttaagaaatcaacttttaatttttctaatcttatgttgtatctctaaatgttgcgagatcccggtgaaacatgtatgggtagtgaagatgatggaggacaaaatcaacgaagaaattgcagccttggaaagttttcgaacatttgctttactggttacaaaggtggcagttgagggatctgctctagcgatatcgaagtgctagataaaataagattcagcaaatgaagggaatggcgtaaagtgtaaacattagatgtctcttggtcgtggcaagtactctgagatccccttggaaaaggagttctaacatgtttatgggaacatactatctacatttctattttctttatgcggatttaacattctcctttgtgtttgaataggaaatttgatcctttaggatctattatatgggaccattttcatcttaacccgacaaatttagcaacttagaatttttcaaatgttcttttttgggaattctagcgtgattgcttacgagatagattgaaattaaatgattttggtccgaatttaaattttccttcatagtagtaagaagttcttagatcattccaatgattgtgaccaccatctcattgaccacatattttcttgatatatacttttggaatatcaactttttataatttttacatatgtaaatttaaagatataaatatttaaacatttatattggtaagtatgaaaaaggtaaagttaactattaaaaagaaacgtgaggagcaataaatgtgattacactttttcctttttttatactctagctcatagaaacaatgttaaaaattcatcttcgtcttacataaaaagttaatattgcctatacgtattaagataattaacatttttggggtcttatgtggattaattcatgatggctttgaagtttgaatgaatggaatttttttattagtaatgttagtatagaatagcgtttactagctactcaaagtatttttcaatcctagaatatgtcaaatattatgttaatcattttatgccgagccaaagatagtcatgtaattgaggtttgtaatggcatatacaagttgctttctccatttctccaaaaaaacaagatagattatctcgaccaacatcggcccaagttcactagccctagcaaaaagaagaacaacatgagggaatatggctatatggaatgaaaaataagaggagaatacggcaatttcttaagtgaaactaaaagtagcaatatatatcactagatgaaaaaaatgaagttattcaagaaaaaaaagtgctcattgtgataattattagaataacaagaataagcatagaccaattgaccgaattgatgccaatctagctacttctaaccaagcgcgcgcgtagcgcgcgggcaaaccactagttttttgaaaagtggagattatatggtgaatttgaaaagtcgaaaggatatgtagtgcaaaaaaaattgtcaaaggtatatactttctccgtttagaaatcgttgcaccatttgcatagtgtttcctattcacatcttatcatttgattatctttggtgatttatattttatggaaaacatagttatatgaaatcttgttagattcgtttcaatgtatattcattaataattaaagatattaacgtttgaaatcatgtatcgacaatcgtgaaaacataaaacggtgcaattatttttaaacagagaaagtatatggtaaaagaattgacattttaccaattcaaattagctagtggagtaaatgttaatgtagtgagtctaaattgacaaacactctcaacaaatatcttccatctactcattcattgcctagtaagaccatactcagaatcttgccaatatttataatatattaaaatcaatacacttttgcatctcattcctttcggctttcatccgttgcttatataagttcatagcctcaaagtcatcgcacccaaaaacaaaaaagtgccaataaaaaatctcaccacctcacatatatatatttaatacacaccaaaaccaaaaccaaaaccaaaaagtattctttatgtaagagagagaaaaagaaaagaaacaaatatcttctaagatcaataccaatcttcttcttcatcactcatcggccggaatttaaattttccggtgacccagataattttccggcgagatggacccacagctaatttctattagtggtagcaacaacaacaacaacaataatactagtactagtactagtgataataacaattatgaaaataattgtgttgaagaaaataatgggttacaatggaccaacgaaaaacattcaaatttcttgagattaatggaagcatcttttgtacggaattttttggagagaagcagcaacaatattaccaaagttactcatcatgtaacttccagacttgaccgttttgtccctgatatttccgagtccacccttgatttacataaatcaggtaatttttcatattttatgaagtattatttaattttcatctttatgattttgatcatcatatttatatgtttatactccctccgtttcaaaatatagtttccatttcattttgcacagtctctaagatgtaactttgacctacgatatcttctatttattattagtaaaaaatataaaaagttgatattaggaatttatagacgaatctaacaagaccccttataaatatattttttttatacatttagatcttgtcttgatttgttgatttaattctttgtgggtatttggtgaaatgtataataagactttagacttgcatgtaatttagatttatcgttcgattaatcaaattctgttactattgagtttgatttaattaaagtaatgcattttgtattatattcttacatgcatcttgatgttgtttatggtaggactgaaattttagtgtttgtttggtttgaatgatttaggtttaataaaagttgcacttttttagaaattgctattactagtatttgataaagttatatgtcttgtagtgttaaataatactattcctcaaccgaatttttttacctatagtaacctagtaatcaacttcctcctattaatgggatttataagtgtaatccttgatcaaaaatatccccaacaagagtgtaacaacaaacaataatgtaaaaaactttgtgtacactgtctagttgtattcttttattactgtttaccaattaccatatatagttcataatataccgttcataagatgttgttgagtttgttgggtaagagatcgcctacttataaattaaaattaggcaatgttaagtctaattttagaaagaaaattagcttaagtaataactaagttaattttttcgatgattaatttaagggtaatgttatatgtagccctaagggctacatataagcattaaatacatgttttaaaatggaaacagtttatgaatttatgataaaatttcacatcatttgaggtaataaatgcttaaatcaaatttttatttctattttaaacttcttatacatagcccttttttaataattttgtaagatacgacttaaactatagtgatttaaagttttaaataaaaaaaaaatcttttaccataatgagtaaatctagatatttttgctatttgttatgtttcgtatgtctttatcaacttgtttaattggatctttggtatttcgacaacttctatatgtaactatcgaccataaaaaaaaacttattttataaattttaaaatcgtagattaagtgaaatcatttttatataaataattattttttaatttttaaatcgttagaatgagtgaaccaaacaaccaccaaaaattatttaaagagacgtttaattttaatataaaaatagacctagtcactaaataaattaaactaatcactgaaagaaattaactcaatcactattgggttaattttattttaaatattggatttacccttgtttaattttaatttaataataaacaatcttttatcaaaccaactaagttgtattcatttttacttcttttaatgaaaagatcataacttttaggcctcgtttggttcacatgggaagtaatttcccatgggaatttacatttcatgggaaattctttcccatgttaatttcctaggaattagacaaaattgtttggttgccaccataggaaattgcatttcctaggaaattactcaccacggggggcttggtgaggagcttgtcttggcaaccaattgtttgagtctcttaggggactcaaacgggggtatgatttcccatgtttcacgggaaattctatttcccttggaatttgtatttcctatgtttctctcatttccctccaaccaaacacaacacccataatgtatttcctaagaatttgtatttccaagagaaatagtttcaaaccaaacaacaccttagttgatcttttaatatatgatgcgatatttctttcaattcataaaagggtatgacaaaagatgttcacaacgttcctttacaaatgctaaatatagaatattagttgattattcacatatatttattttttaataagatgaaaaagaaagggtccaaaaagatagaacttagatgtcttcttcttttcctttttttttttcttttgagggttgttgctgaatattgattgcttcagaaacaaaagtaacgtagaatatgcctgttgagatatttttagcgtgataaccttgacctttatgtatataattgcgatatttataagatattttcatatctttcaatgtgcttttgcttttttatattattatcattgtacatcaatatatttaaattagtgcatggtattatattaatctacagtacattcagatcgagtgagcagaacttgtaacaggcaaaagggaagaggcattattcgtccttacaaaatgtcacatgatcaggtttgtacaattttagcattcctttaatattttaaccagtatgcgttctagtgatgtcgagagttgttacttttcgtattttttgtctagtaaggaaaagttgacgttataacattttaagtaattgtatgatattttaaaagataaatccttaaaagtttggggaagaaagcaataatttaactttttacatggaatgagagtaagagtttgtctataatagtcttttgtcatatgttatcataaaaaggttaagtatctaactacttgcgtacatcttttacaattaatgagatataattataagaccttattatgatattttattaaaatgctagccaaggtgtcatgttggattcatggttatgctttcactttttatttcaaaggtcacatatttaatttcatatcttgtaactacatgacattttatttttaattaagactttgacttgaaaataaagcaattgtatattagagatttagaagagagtgtcacataacacatactttttaataacaccttttaatattagtatagatattttattggatagagagatgaatgggggagacacaccatggtagcaacaaaggttacgtaaccgtgtttcaaatcatcaaatttttgtttttgcgtgaattgttttccaaatacgtaatcataatttaagttggttgcgtaatcataatctcgaatgaaattagtaaaaacttgttgatacgttggaggtttagtgttgacattgctgtataatttgtttttttaacctattggtgaatatgttatgacatccttttattatcacaattttcatttattgattgtattgcattatcaagaatcaagattatttctttatttttttgcacatttgattatttgagaattgagacggttttaaataagcaaattatgtcgtacttcatccgtttctttttactcgctacactttttattatgggaagtttcacattacttgctacacttcttttttgggcaataaactctctctatctctctcctcctccatgggtccttttcttttttttctctctactctcttctccaaaaatttcctaagaaatcagtgaaatgagaagtgtggcagtaaaaaaaaaagagaataaagatatatgcataagtgtatccgtagtatatcatgcatggacaagttaagaatgatacaagtgagctcatataatccaaaattataagcaaaatatgaggataatgtatagaatgatgacttcatagaaatcaaatagtccacgttgagctatgcctttagtacttgtttacgttctggaccaaactcgaaataaaggatacgcattgagaaaagaataagaaaataaaaataatatgacgtggcaaatggaaaagatattttggagttgggcttttcacaaacatgatctttttcgaaagtggggccatttttgtctccacagcatgatctttatacatgaacataaaatatccaatcctcgaatagtactagtatgcagatatttcaatgacgactttttatctgattttttttctttttttccctttgacctgaatttattgtatatttcctcatggtattaaggcatgttttcttcggcataaaatagctgaactgaattgaactaaactaaactaaactgaactgaattgaatggtgatatgtaagagtaaaaacattgtcaagaactgaactgaactgaactgaattgaactaaactgaactgaaaataagatggggaaaacaggtcctaaattaagtaaaatatgtttgatactttatacagctttaattcagattttgactgtttactctagtggaaaaacttatgtccaactgtatcaccatttggtgtcgtaggtgtggcattttttgattcaagtacaatcgaatattaattttaagtgttgcacctagttgaatagttgatgactatattatactctatctctttgtatatcacaaatgtttgtctcatatacacattttaaaagaaacattcacaagaagaggcctaattattattcattttcttttataagttctaactatggattattttctataggtctcaggtttatgttgtgtgatttctataggtctcgacttacttataaccggtttaaaagataagattttttaaacattttctaaaccggttataggtaactcaggacctatgaaaatcacaagatagtaaacttgagacctgcagggaataattcatagttggaacttataaaagaaatgggtaataatcggaccctttcttgtgaatttttccttttaaaaatgactatatatcatcaagtttataggttcaattcgtaaaaactgccattttttagacgaaaatttcttatcactttcctatatgtgtagtaattatatatatctatgtatatataatcaaaatatttattcatgaattttaagctaatgtattgaatattgatattacagctaagctaataatgacttgtatggcataatttcacaggttgtcccacatataaaggataaagtaagcgataagggtcagtaagaccatagcaagtgatgtgaagtgcagcctaccggcgtattgctgcttctataaaccaaccccttatatctggcgatggctgaaatatgttttggtagaagtagtagcatcgtcgtacaccactaatacttagagcattctgttgatctttcatttttcattaactcacttccttggtagtataagtatttcagttgaccactgctttgtcaagcttcacttccattttaaaggaaaaggaatacaagtaacagttgatgaatccatcaacacataacttctcttaagtgaaccggggtttcaaaatcttcaaaacggtcttgatttatgtcaagtgtttaagccattaaccaataatcgattcgtgaattattattgattgtctttaatttacaacataccttcatagttactacttgaattttgacccatgtattcccttacatagcaattctatataaatgtcgatagtagatttctggtgacatttataaatttatgcattatacaagctaaaactagttaaaatgaagataagagatcattaaaatgatattaatgtgagaacaaaatgagagagtgagagaagatggaggctttagtcctttatgagtgagctaataaagtaatttttaggagaaataaagtgtcttacataaggtaatttatctcattagatatttataaatatatagcggaattattctactttattttagttttgtaaatatgaaaactaacaattggataactaaaccttttttaaaaaagttttgagctatgaggttgggtttggtttcactaaatagtatgttcttgcttgtagaacaaacaaaaatcaaacagtttggtagtgtgagatttttttcagtcttttatctctcctttcaataattgcatgtctttgtaagtttaaattactactcgaatccgacacgtcaacaactttggagtctaggaaaggattttagttagggttggtaggggccttaccctcgacaattatttttggcatacttcctccaatctgaaatgaatgaaacgtttccctcaataactctcacataaaagagagaagtgtttcatttacttcaaaccgagaaagtaataaatatcatagatattttatatcaaatatacaatcatgtagcatattagtaaaattaaagatttaaactttaatataaaggtcgaaattcaaaacttaatccctatcttcgcccaagacctgccattttgcatgatatccaacatcaacggtcaagctcaataacatcaatggtgaagaatgcattgtcacgtcgatttaacactataagatagatacaaatatatagtgaaatctaactcaacaatatacattaattgacttattctttatctttaatggtcgagtaggtaaatattatataattatccacgaaaaataaaatcaattattccaaacacaaactatttatacatacatagtaaaattctaaaacaactttgcaaaaaaaaaaaaacaacaaataatacagtaaaactaaacaaaaataggaaatagaaaatttattctaaattggtatgcctagctctaacagcctcaggagtctggcccaaaatatcagcaagcttaaacacaaccatttcaaacaacacaaacaaaactccctcataaagacttcccattggaagcaacggcctagattcatccacgtgtcctacttgatgatcatcagccattgtctgagcaggtacatgagctacaacagtggcatactccacagaggatccaatctgaggttgagcagtaagaagcaacacacgagcaccgttagatttggcaaccttgcaaatcgcatcaacggtggagaatcctccaggcccagcagaagctatgagaagatcagtgggcccaatagggggagtagtcatgtcaaatacacagtaaacagagaggcccaaatgggctaagcgcatgcacaaggcctttagcattaggccttcacggcccactccatagacaaagatgcggcctttttgggcccaggtggtgcttatttgatctactaagaggtctaaaggtggtggtgtggtggtgggtttggtgaatatggtggctatttggttgcatatttgggtggccattgagtggcttctttcagccattttaatttcattcacaaacactctctctcttcttgggatggggagtggggagtggggactggggagttctattttagtaataaacttttatggagtactttatattgttacaagatagtaccaattgtggaccaattatattgttgggctttacttatccttggactatccaaacacttattgacgacatgtagcaactatttcatcaatttagattcatactattaaacatatttaatttttcgcgaaactaatcggttagcatatcttagaggtgatcattttggcccgacccatttttgggcagaatttttcggcccgtccgtatattttttggctttcggcgggctttgggcgagcaaaaaacgactttttagtttattttttggcctgacccgttttggctcgaaataacgggctttggacacaaaaattcggcccgattttaggcccgacccgacccggcccaaacccggcccggcccatgatcacctctagcagatctactataaaaaaagtcacaatatttttgctacctcgattgacgtggatgtttaagcagaatctttgttaaataaaattgttcttctaaattcgttaggagtcttccttgagaaaaggatgtcctaactttctttgtgcatgaaaaaaaaattatttgactttagccttagagcataaccgatggttgaactcttttaaaacttcatcaagtattttattattttatatatcattcatatcacttatgcctaacttattcaagaacctccattttgttactgtcaattattatacaattttttgaggtcatcaattctctttcctactatttaccataccccattatattttctttctccttttattccatccaatactcaccattcttatcattttcgattgattagatatatacataatgatcaatagttgtaattaaattatttttgtaatttgtattataactaattattaccatttgtttgggcccatttcttggaccagcccacctacaagttactaaaatacccctacatctagggaagcaatccctccaccagctggaggtgaccaaaataccctcatttattagggctcctatcctctataaattggggttgtctcatcagataaaggtaagcaactctaagttgccaaacccagagcatctctctctacattgatccctttctctctctacctcaatcatttactgacttgagcgtcggaggggcgatccgggaccacccctgggtaggctaaccttaccttttgcaggattccgatgtacggataacggagctcagacgtaccttcttggggcccatatcaagtttctcagcacacatcaacacttatgatcaccctcaatttcttagcagaaacagtttggcgccatctgtggggacagtacaagaagttactttgccaccactcaacaagattcaccttgttgctactcaccaaaactcacctcattgctgctcagcaatggccccaaccatgaagacatgctccccagccaaccgttcctggagagctcaagcatcccataagcacctatggtgctatccctctattcgaatgatgaggattccaccccaatggagaatccactgcagagtcggtcatcccgcagcatcaggtcagatatgaattgctgaaccaatgcccataactgcaacaaacgtcaccttgattgcatctcatcctcaacaaactctcgagcaaagtcggatgggtatggtcttcactcgtcgtgaggagatcattcgtccttcctgagatggtcagcctaaccggctagggcctaaatagagggaaggaccgtgccaaccctcaaagggcaaaacctgttatcacccggaagaggttgtattgaagaacacaacccatgaagactgatctgaacgaggggtagggtgactcagaaccgtaaaacccctaccgaataagaagtggcaccctcgagtttatgatgtagctcagccagatgtgcctattcatcatcaaagacaccaactcatcaacggtacctactccttcgatgcacctactcatctttgggtgcttgctcatccttgggtgcttgctcagccgaggcatctactcggcctcaaatgcctactcaacttatgagaaatttatctgagcttcaaaggcacactatcaaaagcctggcatcacccagatcagtccagcaaaactatgactatcaagtcaatagaggcgagcaaaaggaggctcaaaaggctagaatttcgccatgacacctcctcggtcggagggggaaatctcactaacatagccaaaaatggctaagtacaagatacccgagcattcatgacgtcaaaatggtgaagctcaaatcgacccatatcctccatatctcggacccactcggtcactaggagaccccttctcctttctttgagtcactcatacttagcggcatactcattcaagctaagtacttaaattggtgcccactcggacgacatgtggctcattagtcccttattcgagtggcatccgacccgctcagtgataggagagaccctctccttcgtcgagccgcccttatacttaagccaaatttaggctaagtaaatcactgatacctgctcggacggggacccggtcggccactcagtcttgcacataacttgaagcgaggcacaatctcggccaaggaagctgctcgggcagcctatactttgcaaaagttcgagggcgttacttcctaacccccaccagggcgtttcccccccctcaggcgtagcagggtaccccaggaacatagatctctctcggaatccgctggacgatcgacttgggatggaatgatgctaccctatccgatcatccagcgtggggctaattgcttgaacacctcagctggtcaaatgaatacacttgatggaggtgcgatgatgtttgtcatcttctgaataaaaacttctccaacggcactcaaatatggagaagcctcccccgactaacttagtcggaaaacgactaagtatcaacaattggacctactcgagatctgagtagcgttagaagacctcatcgggaagcatggatctccctagctttcccgagtcgagaatctccatcatgggcacctccttagtcagaaaaggagcgtcccactaacttagtcgaaaaacggctaagtatcaactattgaacctactcgagatctgagtagcgtcggaagtcctcctcgggaagcatggcgctaacaaagccctctcgggtcgggaagctcgttaattggcacctccttagtcataagaggagcgtcctaaccaacttagacgagaaaaagctaagtacgaaaaaatcaatctcctcggtaaacatggggctcattagcccccccgagtcgagcgtatatctcgtggtacctcctcggctaggccaggagtaccctaccacatggcaaaaatagctaagtgcaaacaaatcaacttgctcgggaaacatggggctcactagcccccccgagtcgagcggatatttcgtggtacctcctcggctatgccaggagtaccctaacacttagcaaaaatagctaagtgcaaataaatcgagtcgctcggccactaagagaccccctctcctttgacgagtcgggctcgtacttagccaaattcaaagctaagtattttatcggcaccggctcggacaagcatggggctcattagctcctcatccgagccgcgtccatccaactcggcccaaggatgccttcccctccttggttgagtcactctcctaagtcttggatgacatagcgagagacggcaccggctcggacaagcatggggttcattggcccctcatccgagccgcgtccacctaactcggcccaaggaagccgccttccttggttgggtcactcttccaagtcccagtttgacttggcgagagacggcaccggctcggacaagcttggggttcattggcccctcatccgagccgcgtccacctaactcggcccaaggaagccgccttccttggttgagtcactctcccaagttccagtttgacttggtgagagacggcaccggctcggacaagcttggggttgattgacccctcatccgtgccgcatccacctaactcggcccaaggaagccgccgtccttggttgggtcactctcccaagtccctgtttgacttggcgagagacggcaccggctcggacaagcttggggctcattagcccctcatccgagccgcgtccactcaactcggcccaaggaggccttcccctccatggccgagttactttcctagccaaaatatggccaaggacctccctcggcatctcgaggagcgtctatgacctccctcggcacttcgaggagcgtcactcaaatacttagcgaaattcaagctcagtacttcagaggggcacccactcggtcggcacgtggctcattagctcctcatccgagtggcgtcctatccgctcggccactaggagacaacatctcctttgacgagtcgttctcatacttagccaaattcgagctaagtaacttattcaaacccactcggacaaccggtggctcggtcaaaccttgagggcgccatgaagctaagcctcgagggaaccgggtcggccaagtcttaagggcaccatgaagccaaggtctcaggcgcaaccggtcggccaagcctccagtgcacccgagcatgcatcgcttcggagcatgcacccggtcggccacgagctagagctgctcggccagggcaccccctcgaacatgagagcggctcggcaagagcaccccctcggccatgagagctgctcggccagggcaccccctcggccatgagagctgctcggccagggcatcccctcggccatgagagccgctcggccagggcactccctcggccatgagagctgctcggccagggcattccctcggccatgagagctgctcggcccacaagagctctccctcggccatgagagcggctcggccagagcaccccctcggccatgagagctgctcggccagggcactccctcggccatgagacctgctcggccagggcattccctcggccatgagagctactcggcccacaagagctctccctcagccatgagagctgctcgaaccacaagagctgctcggctgcgagacctgctcagcccacgagagatgctttagcgagacccccgtgcttggttaatcctagcgccagaagattttctcggcaatgatccggcatgaaaattcttgggttttgctcaatatcggcaaaaatgcaatgatcttattccgccaatcaaccgaactaaaaatggcgatttctactccgattacttggcgtggggctaattgtttgggcccatttcttggaccagcccacctatggcaaagttactaaaatacccctatatctagggaagcaatccctccaccagctagaggtgaccaaaataccctcatttattggggctcctatcctctataaattggggttgtctcatcagacaaaggtaagcaactttaagttgccaaacccagagcatctctctctacattgatccctttctctctctacctcaatcatttacttgacttgagcgtcggaggggcgatccgggaccaccccgggtaggctaaccttaccttttgcaggattccgatgtacggataacggagctcagacgtaccttcttggggcccatatcaagtttctcagcacacatcaacacttatgatcaccctcaatttcttagcagaaacaccattaattgaatttttaagccaattgttttctaccatatccaatttgggaaatttttatgaggctaaataagttttagcaaaaaaagtgtggaaataaaatgtgtggaagtactttaatattaggctctatttatggaggaagaaaaaatagaatggttgtaattttttgtttttttgtttttaaattcgtattcaatttcattaacttaaaattcgtatcatattcatttttgcattttatttattatttagaattcgtatacgtttattgtttgttggttatcaatgcgttagagttcactttctcataacaacataataaacttaggtcccacaaatattaaggttagcttttccaaacatagaatacttattaaccctgaattaataataacaggtcatgcctccgcagggtattatcattaattttgggagataaggtaaaattgcgaattatactacttagtttggttatccttaacaaaatcatcaaaaacgttttgggtttgaagcaagagatagttaagtatgcgatgtttgccaatctaaacaagaattataaagtgttagaattagtaaaagagtttacttaccttgagaatgtaacgttaagataagtcctccgtctgcttagtgttgcatgttgataggatcttgtattcacttattcaaatgggacattaaaattgaataggcgatcaacctagaaacctttgcatgttttaggttgttttataagcataaaattgaactttgcttttgttttttttgtctgtagatactatgtctaacaacaacaacaacaacaacaacaactctgtttttaacatttgtctgatcctttccttgaaaaggacgggatgaatggtgaaaccttcattaattgggaaagaaccctaagactcgtactgaggtatgagggtcgagagtatgtcttagaaatcccactgcatgtgattactaataaatcgactaaagcagacaaacgtcgtgttaagcaggccaatgataagtgtgtactgattacttgcctcatgatagcagtcatggagccggacctccatatgagttatggaatggaaaaactctaaacttgtcttttcttaagatctggggatgtgaggtctatgtaaaacatttactatcagacaaacttgcacccaaatcagataaatgtctctttgtgaaatacccaaaagagatacttctataaccgtcaagagaacaaaatgtttgttgttcgtaatggtgtctttcttgaaaaggaatttgtttctagaaagacaagtgggagtaaaataattctagaagaaattcgagatgagcaacaactagacgtggttcacaccatgccagagacgacccgacaagacgaaagtcaagttcaggagatgacatattcaagcgcgtgaacctcctaccattccacttgaatctaattcaagtgaagatctttaagaagttgaacaaaacatttctcttgatgcttagtcctcgcgtaagtcaagtagaccaaggattccaaacaagaggttggttgatttcctgctaactgaaaactctgaaattatgattttggagtcttcaaaacctactacctacaaacaagctttgacaagcctagactctgagaaatggcttgaggccatgaaatccgagttagactccatgtctgagaataaagtttggaccctagccgacttgcctggtggggttaaccctattggatgcaagtgggtgttgaaattgaaaacagacaaagatgaaaatgtctacgtatataaagcaagactagtcgcaaaagaattcacgcaaattcatggtatagactatgatgttaccttttcgccagtaggaatgcttaagtcgattcggataattgctgcattttacggttacgaaatctggcatatggatgtcaaaaccgcattcttgaatgggttcttgaatgaggatgtgcatatgaggcaacttgagggttttgaggatctagaaaatcctaaaagggtttgcaagcttaaaagatccatttatggattgaagcaggcatctcagagttggaatcttcgatttgatgaggcaatcaagaaatttggcttcctcaaaagcgaagaaaaatcttgtgtttacaaaaagtttagtgggagcatcttaatcttcttgattttgtatgatactactcatgggaaatgacataccaatgattgagttagtccaggaatggttgaaaagttgtttctctgtgaagaaccttggagaagctgagcacatactgggaattaaaatccatagagataggtctcgaaggatgattggactaagtcaagaaacctatattgataaagttcttgcaatttcaacatggaaaactcgaagagaaaattcattttccatgtcacatggcatatcacatagcacgagtcagttccggactgagcctgatgagttaaagcgaatgactagcataccttatgcttcagctataagatctatcatgtatgtcatgataagtactcgaccaaatgttgcatatgccttgagcatgtgtagcaggttccaagcaatccaggagaagcacactggattgcagctaagaacatccttaagtacttgataagaaaaggcatgttcttagtctatgaggtgaaagtgaattggttgttaaaggttatactgatgtgagtttccaaaccgacaaagatgattaccgctctcaatcagggtacgtctttttgtctaaatgaaggagcagtgaggtggaggagctcaaagcaaagcactctagaactactttagcgcatggccttctcaaattcttactttttgactttttaccctgtttaccaagtttctcctacctttctcaattccttttttgtgggtttatctgatatggttggtgaaactctagttagtgttttttaaattgacaatctagttattgttaatttctaatattaagtagtagtatataataacataacctataagtactttatgaacaaatattgtcgcctaacaataaagtacataacatagcgggaaaagacatatgtcttctatgaataaaccatagtgtttcaactcacataaggacatattgacaagtcctgtttgttatgaacaagtcttcttatacagcaactttttgcaaccatatttacaagtcttttacagtatcgtgcaccatattttctctcttggtggcgtagtgtaccctccgaaaacctcatttggctggacgcggcaaaagaatgattacatacaataggtggaagttagaactgttcagatcaccatccagcagccaactatatagtctggcacgtgacaaacgtcaccatccgacagcaatttactagaactgactgcggagtctggcatgtgaacaatcggacagcaacatgcttgaactgattatagagtttggcatgcgagcgaatctgatggtaacctgcttgaagtgcaatagagtccgttgtggagagaatccgacagccatccgttgtactgactatagagtctggtgtgtgagccaagttgttttaaccattcaaaagccagctcgtcctgtggagtctaccgtgtcagccaaggcagcattccgcagccaactattgaactaagcccggtgtgttagtgaagaactatattaggttggtcttcaattagatccagtaagattgcatttctgaaattgcatgacttgtcctcttaagctgcactcctctacctgaaagtcaatagaacaggtttcaagttgtcagttttgaacttccgtgaagtgtaagagttgttggaaaaaggttctccaccgaatatgtgagggggcattccaatagatccacttagtgtgggcctgttggcccctcaccactaatatctcttcttcgttcaatggagaacaagttttccatctagccttattttctattttcaaggttgtaagtcttagttaaaggcaggaattcttgaactgactccacaattcagtaaatccaattagtgtggggcgtgaaataacctgcgatagatgtgttctcaacaatagatctccgcactcttgaacaaccgtaacttctccactgtgtactctcgccaagtcagaaattagaacatccacttgctctgcctgcatacataacaaaatctcaggcaagtattaagattaatcacttgatctaatatgccattcatgtattgactatatctctgtgaagtacaatacaagatgaattatttaaatatcggtgatttaacatttgattacatcatgtcacaagatatattattatttctgcaaacagaacttcaccttgggcacaaagccttgcacttgcgaacagatgctttctgccacctttaaggctgaattcatcgcttcgtttatctcttttatatcaatctacaaaacacccacatacgttttgtaaaaaggaaacatagagagttcaagatagagtagagcaaagaagtagccaaatatcttacctttacattaccattgagtggaagacgggatgatataatctgcaaaccttgcgttaactccaacaatgaagtcgtataatcttcttctaaagcagaccattcatccaaagaaggcatctgaagatgcattaaatactaattaataattttacaaaactaggaatactcgcaacatatgagtgcgtatcacggacataatatgacataacatcaatatagacggatattatagctcctcataggtcagctcttcgtcaatctagtacattcagggtgtgtttggttcaattactggaaatgtaatggtataaaatcagataagagggtggaaattaaaggtaactgtgcgcattatttcagaagttatctggtttaaccatggaatggaatcaattgaatcttagtttcatgaattcacaaagacacaaagaactaaatttggtcttggatgacgaaataatttctgaaagtgctgcatccaagcactcccaagattcacaagttctcgccttctcggtcttagtttatgagttggtgacgacatgtctcaaaatgtatagtagcctcacctgagcatcaagaactgcagatagagtttttgcttctttcaaaagtccaaaatcaacacgcttgcttttcacagaatcctgcagctccgatatctttactcccaatgaataaagcattctctgcaacacgtaaaaatgaaattacaacactaatcctaaacatagaatgtgtagaaaatgttacagaagcatttagctgacaacacatttcatctgaaaatatgatgacaaataattaacgtgtttttcctttaagatgagctatgactatgctggatcatttgtatatctaactaatttacatttgtgtttcccctaggaaagtgtttttcatcttatccgcccaaccaaacaaggctatatattttcaaagatgtgctcaaagagtgttaataaaagacataaaagatctaacgctccgaatttactgacaccaaatcattcagtttccagtatctagcagttggtgctttccttttcatgatgcctaattgagcaggataaatccttaaaccctcaaaaggtacactatatctcaactatatgttcataactcaaacaaggcttctctaattcaggtcaatcatagaatcgtagtaccttgtaaaaatttccgaaaatgccgtaaagaattaatcacgacatctttctttcataatgcttaaatgctttaactttccaaaatcaatagaacttatccatctagagaacaccaaatactaatacatttcaccaggaaaaagcacactctattatacactcgggtgtatttataatataaccaaaggtatatttctactaatttgcagctttcgacaaatatagtttgttaaaatatcatgacacaactaaaaaccttaaacagcagtaaatgaaacaaaccaataatgctaaaccaatgatcaacaaaaaattcaacccaatgattgaacataataaatcagataacacatcacaatgaactaacctcactttgcttcttctgggaattgaagcatgtttgagccttagcattagcaaacctccattgaagataatgattatgaagcaacttaagccgatgtacatcatcttgatggtttgagccacccttcctcaccgccaccttcttcccctccatcgtatgaggcctcgaattcgctaatccaggaggaggcatcggcggaaggtgaagactacgcgccaccttgttcatactaccacccttaacagaatgcaatacactcatctgttgttgttcatgattggaaaatgtaaactccattgacctagaacacggcgtcgaaactctaccaccacaattgttattatcaacaggctctgatttcactgactcaccatcaccatcatcatcatcatcatcatcattataattagcatcattagcatcattattcatcccattggcttgaagcaacttggaggcggccgtatcccaactccgttgtcggataagtctgggacccaccggagcaggcaccggagtgtcggttctagaaccttccttaaaaagcttaatagcagcccggggtttggaggaggttctcaccgggctaaaggagctccggttcaaggaatcgggccgattttcgtcagcgtaacgcgaatgtggagctcgaaaatcggtgttggatcgtcggagagactgatttttagggaggtgagattctgccggtgttgacggaatttgtttagggatcatcggagattttggcaccggggacatgaatcttgagctcacttcacgaaccctaggtcgagatcgtcgaggatttaggggatttgtcggcattggagttgaaatttctgatgataattggggtttagggttttccgacgccattgttgggctcattttgaggagttttggggggaaattgggggaatcggttcaattggagaaatcctagaaatcgaaaaaaggaaaattgatctagtttgaaggtagaatgggggagagtgtgggaggcaggagagagattgttaagttgaaaggagaaagagatgaagtagaaaaaactagccgttagcaagaggttcaacggtctactgaaaactaggggggataaagggggtattagaattattattttgttttgttgggggaggatatactattattttagttgggggataaaggaaccaaatgaattatctaattttgacaacgtattgtgtcggactcgtccgaccataatctttggtcggacgacttttaggtaatttcaatttttttcaattagtcttaatttttttcagttaatcttaattttttttcagttagtcttcattttttccagttagtcttcattttttttcagttagtcttaatttgttttcagttagtcttcattttttttagttagtctaaatgaaagtaaattacctctaaatgaaagtaacttagatctaactgaaagtaacttaggtctaactgaaagtaacttaggtctaaatgaaagtaagttaggtctaaatgaaagtaagttacctctaaattttttttcagttggtttcaatttttgttcagaagaccaaatgaaagaaaaacaacacaagctgaaagaatttacacaccaactgaaagacacgaaagaccaaatgaaagaaaaacaacacaaactgaaagaatttatacaccaactgaaaacatcaaaaaataaacaaacctgtaaagctcctcaaagctaagaccactagcattatgattgtaaatctcatgaatgaatttcgtctcattgggctctatatccatgataagcattcgattgttctagcagaacaaaacaagacaatcctttctctgctcttaaatactgcaaatccccttacatttaagaataagaagtgtagttgtactcttagagccgactatgacttcttcgtcttctctttatcgagcaaaagccactcatcaattgcttgtgaaatgaggatgagcacaggtaggttatacactttaccgaagcggtaaattccagatgagattagcggaagattgatcctatagcccactatcaagcggttgaggatctaccactcaagagatgatatacttacccgtgaagacgaaagtttaccggccggtctcaaaacccaattctcgcagcccgtccgatggaaagtattgggtcagacggtctgacccaatactttcactattattttagtttgattattagtataagttagtgagatcattatttttttcattatcataattatggtgtttattattaaagcacctttcgttaaaaaaaaaacgctgaagtactttaaatccatatacttataattcatcattttatattacgaaataaaatcttattttcatttgaggggaacatctttcatagtaaaaaatgaaataattaagtggctatacaattacaacaatatgcaatatttaatatgcataatggttagtctcaaggtaaatatgagcgagtcaaacacaacaagattatccccatagagcgtgagtgtcttatacaagagtagcaatttgtcaatgaactttgaagcaaccattgacatattagtatagaatacatgtatacttgaacataacttaggtgtatacattaaaattcctgttttctatttatacaatttgtaggaagaagtttagctcgaggcatgaagtaactgggttaagttattaggtgttgtacaagaaaaatatatagctctttataaaatgtattgctctataaactccaataatttgttaatataaatcaatacaaatcccgacctatatttcacatatcttttggttctcatacataatgatgccttaacttcaattcaatcattttaataactacaagaaatgtgatttttaataggcacttgaataggagtgaaaaggctagacacaaacgaaattaccatcctcatacaacatcgctggcaaaattcgatcatttgacattaaaagttacacgttcaagttttctactagttagaactattttttcgagaagaaaaatgtaattagttagttgttaaacaagtcttagaaactagaaaatgattttttcacatctaacgaagctgaaaaacaaaacactccgatagacgtatgagacaaattttagctaactatttccagtacataaaaagaaaaataattcctattaactcgtgccctttgtcagtcgcacactgcaaacgttgatcatcttttcaacaattatactgtttctatagctctttggaatcttcatgaaactaaaacttgattaaattacaatcatgtccaaacctccattctaaatgttgtttaatcacttcaaaacagaaaaaaaaaatatcttgactaaaacttattattctaataacgcttcttttaataaatatagagttcttcataaagctaaccctacataaggaatggagtattcgtactaagtttgattcatgtcaaattgcaggttcttcgttttcctcatctacccatcactcttccacgctgcatcaagcttcaaccatctcggttgcttggatccctcaaccaccattctccttcaagctcaattttgatggctctgtctcattaaactctgctgcagatagagtcattatttgtaataatcttggtcaacttattcacgcacatcctataatctaggcacatcgactgtatttgttgccaaagcaacgactttccacaaaaggcttattcttacctctagagaaatggaatacaatacatccacattgaaggtgacaatttgctcgtcatcaatgtggttaagaatctttggcatcctctgtggcaaatttaattcatcatagacgacattgaagctcttctccaattcttgtcttatcaaattcaacatatatatcgtaaagccaacaaaacagttgattaggtggcaaatgttgatcatttatttcattccgaattccatattgtacatgattctaattctgctctccatcccatccttgtaaatgatatttaggagttctcctcgcgaggaaggtcttctaagatctatttcttcttacctttacaaaataaaatgtatcttaccacatatattcaccaaaacattagaaaaaaaatataaccaagcaaaatttttattggaatcatcttattatgtatttccataagaaaacaattcataaaattttcaaaagtgaaattgaaaacaattgagtaaatatgtttattgaaaagcgtgaaaagctaaatttgtgtaaaacatatgtttaggaaagaaaaatctttgtatagttagtaatttaatcgacatataaaaccactagagtccaatttaccatagtttatgattatactagtaatttatgcacgcgatccatgccttattttttaaaacgtaattctagcttttttgggcataagcacggatacaattcgaacattagacatgtttttttggctagttaaatttcgttggttaagcctatattgcttaacatgttaactcgacttttattttaatttaatttatactttctttaaggtttctaaaattaaaactgatgagcgataaaagaatgttatgcagatttatttcagatttcttatattcttgtcaacaaagtattttgtgttaattgaatcattcactttgttaattgattcttttttcctgtaattcttgattgggtattgattgatcaaatatttgattaatataatttacttttttatttttttcagcacgaacgatacaaaaaagagggggagattgcgatctttcttgtaaagggtgagaatcgaaccccctatcagaaaagtataaaaagtttcttaccatcactaggacaaccttgattctcattttcatagtataattacattgatcaattatcaatgtatagtggcttaaatatctaatcggtttacgatcgaggggccgaagaaaaaaacacacaataacttgaaaaaaaagaagctgtattatcttttcttttgatagaagaagctgttatctttactgtaaacgcagaagaagagaaattgaggagcataggaaaatcgaattggggaaattgagaagcagcaacattaacaaataacaatggcgttgaagtttttgaacaagaaaggatggcatacaggaagtcttcgaaacatagagaatgtttggaaggcagagcaaaaacacgaagctgaagagcgcaagttagacgagcttcgcaagcagattcatgaggagagagaacgcgatgaatttcgccttcttcaagagcaagctggactcacaccgtaataatttcctcttttattcgattattattgcaatttcacatttcttatgcttctattgctaaattagggttagggtttttatttgaattttgatttctgttgttgctgttgtaggaggcaggaaaggttggaatttctctatgattctggattggcagttggaaaaaccatttctgatggatttaaggcacttgaaccgcaccctagtgctgataattccgcatcggcttcggtatcggcatcggcctcagcctcagcaccctccttgtcaaatgtgagctcttttttcatctgatggtgcttaatcagtttatatctggcgaagttggggtttttttttataaaaaaaattaatccaatatgttgagattgatagttacttgatcatttgctgttctttacattgaaagtaatagctagatcatctgttgctgtatttctttgctatagacaaaatccatttaattagacatgtaatcagtccacaagttagattgttgagctgagaaactttatggggtttagagattacccgttgctgaaatctagattgttttttctatgaagtctgacctgtttcctgagttaagatgaaatgagaaagataggaaagtctttatgaggaaatgagcaacataagtactaatttcttcagcttcttgctccaatgtcgagatcgtgtcatttatatgatggtaactcttgtggtttgatcgtgcaaccagttgagagaatttgaataacttgaagatataattcattctgctgagtgtagaagagtatctctgaacttgtgcattttttgaggagattgttatgttggacgagtttaagattacactagactggtagaggataagacaggcaagaaataattcacatatatatcactgaactcaagctgttgtatatcgtcataacatgtatacaattgtcgcacttttggtgatgttctgaagttggaggatattgggaagtttgtatctggtcggttgttgtgagggtaaagatcgaattgtaaactatagaaaatgatgaggactttagacttttgcttatgcacatgcccccatggtgatggttccacagaggtgtgtgctactaatgcttatgacagaatggaatgttaatccatttaattgatttactatgattgtggtttttgggcctgccatgatggtggtagatatccaaggaattggtgcgtgtgtgaaaggaagaaaataagaggtaattggattgtgtatccacgttatctatggactatcatgatttatgacgcaattattggagcgaagggacaatcagttgtgcaagcaaacatcttaaattgatacttgtgtgctgaccatgtagcaactttctctcatatgatactgctcagggacccagacatagactacgtggaaccatttaaaatttgaaaatctgaagttttatgtgcaactttccttggattcatcatcctagggtctaggggagttgtgtctatgtgaaagtctacaagaggcaggatttttttccctattggtgctctgatggggtgcgcaagacaagcttgtagttaatttgctttttcctatggttccctttcttgaaatttcagtgtatcatatgctttcttggaattttggtgatgagactcttgcatttcatgttctgtcctccatctgtttggaagaacaaggaggttgtgcatgggatctcctagaatgccttagaaaaatttcaagtaattttatctcatgttggaagtgttctttgtcctcctttccctaccaaatggatctcatatcttatctcttcttgtgtatttgctgttgtgtcctctaatcatattttgtggtgcatcatgcatgttgttctgaaacttgaaagtctgatttagttattgctgcataatgctttttaaatattcgatttcttaccatgattgcttcaactgtgtaatggatactatttctgttatcaatgcattgctgctgtgttgaggatagcttgctccttttctaactccctccccctttgtgcttctggtgagatttgctgttgtttctgattaaagctcacacattggacccttaatattgcagcaatcagctgttcctggagctctatttgaagataaaccgcagtctgccaatgatgcttggagaaaactccattcagacccactgctgatgattcggcaaagggagcaagaagctctggctcgaataaagaataatccagtaaagatggctatgattcgtaaatcagtaagctcttccacgttatattgtcatgcttgtttttactatatgtcttacagtcatatactcgtatggaaggtttgagtctgtgtgattgctggtctgctagcctgtagcacatctagattaagtttcttgtactgaagctgtgtaattattacagcaatagtagaatcaggatattatcattctcctcagctttgtgaaagttggtatatgcaatatatacagccagggacggggttgcattgggtgttattgttttgacttgatgagtagtaaaactatttcttgcttagatgctagtaaatttttcctgtgtattaaactctgaattacttcttcttttgcaagtataatagaacgcttatcacttgtcagtgaggttcagctagcaagtagcaataatcgatgatcagtcacatgtcctctttcacagttctaatgattggtttgttggattatgttactgcacatgattgatgtcaagacttgatttgtttttctaattttgttacccatgatgcagcaaacgcatctttttgttcctttttttctcttttttttttttgttttagggttggaggtgttttgggggggagggttgctgtgtgggacattactttgctgtttcacaattgcaagggcttcaattacctagctatatgttcatcactctgaaaggaagtagtttctgtgcaaatatatgacattctaacatgaaatttcttgtttcaggttgaaacaaagaataaaaatgacgaatctcatgctggggagcgcaaaaaggtgaaatcaaaacatagaaagcacttgtccatacatcaatctgattccgaaactgatagtcatgaagagagagaaaggaaaaagaaggtgaagcgcaaaaagaaagagcgtggctctaacacggaaagtgatggtgatgaaaagggggaaaggaaaaggagggtgaagaacaaaaagaaagaggatgtagattctgaggaggactctagagacagaagtagacatcatagacatacccacagagataatgaaagtgagaagcagcaacacagtagtcctataaagcaaaaaccagacagaaataaagattatgaacgaacccagagaggatttgagaaatcaaagcatgaggagtatcgctcagaccgtcatattgacagatctcctcacaaagataatgaaagtgagaagcagcaacgcggtagtcctataaagcaaaaaccagacagaaataaagattatgaacgagcccagagaggatatgagaaatcaaagcatgaggagtaccgctcagaccgtcatattgacagatctcctcacaaagataatgggatgtcaaatcaaggtaatgattctaagcatactgctctgccacctaggccagattcatacagacgccgaggtagggctactcaactctctgaagaagagagggctgctaggttgagagagatgcaaatggatgctgagaaacatgaagagcaacggtggcaaagattgaagaaggctgatgcggatgatgcacgtgaagctagccaagcaggtaattctcggggaaggtcgttcctgcattctgttcagaagagtgtctatggtgctgagaaaggtgggagctcgacaatagaggaaagtgttcgccgtcgttcccattttcttcagggaaggacggctgatgagggtaatgctttccggagatgatgggttttgtactagtggttttctccacgaagggcctgcatctaaccacaaggatcaaaccatatttcccacaaagaagcttaaaatgaaggctatatgagtttgtttggctgttgaatctaatgatcacaattcttctcgtacataagatagtactcttcaagtcaaatggatactttgttctttttcagttgtgttatgttggcttttggtggtatctatatatatagtccactttgaccatcttgtatgatttatattttatacgcaaagaaaaacatagtcacttgagatcttgttgttaaattttgtaagaaacatcaacttttttttacttatccataattatatgtattaattcacgaagaaagagagtacaatagctgagagtagatgacagccgagacgataatgttgtatgataaaatatcgtattctcaaatttccaaaagattcaaaacttctggtactagtaacaatcattgatcctgtttaaaaaaacatttgatatggctagtcctttccctttcaacttttgatagatatccacaaaccacaatcatagggaggccatggcctactgtcgcaccccccttgactccaccattgattaaagaagttggagcctatttctgtctttcaccacaaagagatcatacaacacttgattcatacttcctccgtttcgttttaaatgcaacaaatgagtattatttgtgaaatataaaatattcacttattgcatttaaaacgaaatggaggaagtatattatatatatatatatatatatatatatatatatatatatatatatatatatatatatatatatatatatatatatatatatataaaagtccaaatgaggcaatgaatgaccaccaagtccaacactatcgcggaaaaggtagaattatggaagatcgccaacgtaacttgtcatgtttggagttcatatatttgcgtttcatcaaaacctgggtctaacatacatacctgttcgtttatgtatgtgaagaccatattagggctggtaaccttctctcatcatgtttttatttacgtaaaattaggtatacgctgacatttgagtcctctcatactcgtatgtaggatgagtctctatgtaaattttgtttaatgtgtaccgtggaatgaaccaaattgctaccttgaacatgtgcattataaataatatctcgaaatccagcacaaaaagatgatccataggacacatgaagttcacaattcattacatttttctgcaaagtacttctattttacaatgtaaaatgaatctccagaaacaaaccacaatacattcatgtgaaccacttctataattgcatttgatgcaaaagacccctattaagcaacttatgtgcctaaacaactaaactaaaccacataactgtgttgataaatatgttaacccttcttctgctgcttatgagcactctcggccttgtcttgaacagaatcttctgcctaactcacaattccgatcacatccaattatacattcgtcgatgattcggaactcctgctttgatctccatcagaatgtttaactttcttcaacaccaaaagtggcttcttcatggtgaccctattgtaaatgtatatgattcctgtaatagttaatactagtcttctatctacgcgatgcgtgcgtcgattgtttgggtctattcttaataaatttcattaaaatataattataagagtgatttataattattgttatacaaactactataatctataaagtgtctagaaattgagataaacatttagatgtaaagttttgtagtcaaattaaatttgtaattttatttattgagtaactatttttctcatatgtcaagttactttgttatttatttagtttattattggaattttgactcattttcaaattagaaaaggatataattgtacaaaatctgaatatccaattaaatacttcctccatttagaaatagttgcaccatttctattttgtgcactactcacatcttacccttagattgtctttggaatttatattttaggaaaaacatagtcatgtgggatcttgttagatttgtctcgatgtatattttattaaaataaaatttttataatttgtacttattgataattaaagatattaatggttgaaattatacatcagcatgcgtgaaagttagaaattgtgcaactatttctaaacggaggaagtatatatttagctaaggacaaaaaagacatttaattaagggacaccatagctccccattgacttatataatagagatgtagtcaataaatttttggacatcaacaaaaaaaactatcaactggaaattcataccacatccatataaaaagaggcatcacttttgagcattatcccaatgtcccgaatctagttgtacttgaataaggtttgctaaggaactaatacacattacatactccatattactattcctaaatcctatttctactcgatataggaatcctaaatctacttttactcggttcctaagtaacatgacacaaactcatctgctaatgctataaataatacactcatgtttcttaactcatagattcatgttatatcacacattatggcagacgacatgagtgatataattccttgcgaaattgcaagaaaaattgcagttgagcatcttgataatctagacgacgtagaaagtttgtcacttgtttgttcttcttggagatctgaaactagcgatattaattataccaacttcttcccctccaaaaacacccaacttccatggttaatgctggctgattcaccctctagtttattccgacgattttacaacctctctaaacgcatgtttcttaagattgatataccaccattcgagcacgacctcaaccacaacctcaaccacaaccacgaccacgaccaccgcaggtttttctcttcaaaaggatggcttattactgtcactaggaaacaagctcttattagcttttttgatcctttcactactactctcatcaaaccacctagtatcccaatcctttgctttcaacgcggtcaatcgtggaataaccgttcttatttacatagtttttccaaattcatattctcagataatgcaagatcatcttcttcctcctcatcctctaatttccaggttgctgtgatttacgatatatataaacatatcgctttttggagatcaggtcaacaacaatggatgaaacctacttttgaagttaataatattgaggatgtctgtttttttaggggagagttttactccattgattatcgttcagaagttatagcctatggaagtgagttaccaacgagtctaccacgaactattgcatatttagactcagtaggtattgaaagttgctcttgcgttatcctcaaaacatggttttacatagtacctttcaaccaaaatgaaagcacattgttgatagtacaaaggaagatgtgtaataagcccgacaaagacgacatgtctaatattaataccaataataataatcccaaacgatggtgggtggaatccgtcagcttaattgagctcaatgttgacaatggcgaaaccaaacttatcgacaatataggaaatcgggcattatttgttggtttaaactcaactttctttgtagaggttgaagatgaggcattctcaggaaaggataaacgttgttgtagagctaattcaatttattttactgatggaaaatttggggggaatcacaggcgtgctggggaaacagatttgcgtatattttgcttgaaagaaggtaaaatggttgaaccatattatgaaggtccttctcgatacaactgtgtcaatccacctgtatgggtggagctccctcatcagtaaattctttttttaactgttggatgatagtagaattactagaacaattaactatattgtattttcttcattttattttatggaatggactattattattgttcttgttgttgttgcagcaatttacctagtgactcttaattatatactccctccgtctttttttatttgctacattttgccatttaggggtgtttcaatttatttgctacatttgcaaatatttccatatatagtacataggtcccacactttatttacaaatttgccatcactcccttctgattttgtaaatgtttccatatataatacataggtcccacaatttacctatttgcttttttgttaattccatttatgtcaatggtccccactccctccttggtctttgtgaaaaagtgcttgtagcaaataaaaaaagacggagggagtagtaaacaaagagattaacatatcttttttaggtgttatttgattggataagaagttaaatattctaggaattggagtttttatggtgttctttgatcgacaaattcatgaagagtagaaattcctgattcccacttttcacaaaatggacgaaattaatcaccaaacattcagcaattcctaaaaatacaattaaatgggataaaaaaaagttccaataattttgcactccctacctttgatcaaacaagcacttagttacttgatagttttgggaaaataaggttacaaaccaccaaaaaccaaaagtttcttactcaatggtgttgtttgtagtttagctagttctcttcatgagatagggattgactagctattatccatgtacatgtaaaaaaaaccatgtcagtgcagtggaaggtaagaatttatccacttgtagtgacgcatgtccttgagtaatattacaggtgatctacaaacagcagtacagcagcatcgcatcagcaatagtctatgattcgaccaaactccaaatctgaattgacttgactaattcttgcaagctcctaaattccattatcaggaggatggtttgcacttgcacttgcacttggctcgccttcatgaatggcaatagctttcactccgggactcagtgatgacgagtcattcttcatgccactgtttctatcctcatcaaactcttcctccatgaaagaacccttgcgacgaagctccttcacttttagaaactcatcataatgggcccgtctgtgctctttaaaactcaaactcctatctgaatctggcaatcacagaattaaacgtatagattaactcaaacaatggaacagcttttccataacttgcaagaaacactggatggtgaggattatcctggtgagtggtgactggtgtagtggaagaagctaaacagtaaattatgcgaagatgtgtgatcaatcatcaaagacacttgcagccattagtttttttttttgttaatgacaaagtctctacaatatctctccagaaaaaaaaaatggtaaaagtggaacataccatcaaacaattccaaccatctaatacccccactcatctatgatatattgacatgagaagtttttccctttaacttttgatggataactacaatcacagggaaggtattagaacacaaacatggaaacttgaacaatttcaaacatctaataccaattccctttcaactttcaatggatatccacaattatagggaggcatggcctatgtagcactccctttattccaccattgtttaaagaagttggagcccatttcaccagaaagagagatcatataacagtttaagacctgaagtgattcaaatatgaaaccaatgaagcaatgaccaccaggtccaacactattgtggaaaaagtagaattgtccaatacctgccaacataacttgccatgtttagggctcatataatggcatttcaggaaaacctaggtttaacacacctgttcgtatgtctgttaagaccatattaggactggtaaccttctaacatctcagctttatttacgtaaaacttacatatctgatgacatttcagttgtctcatactcgtatttgtattctggtacccccgaggaagctaccatcagtgcacttgattttggtctttgtctttatatcctttcttcacattataagtggaaacttagtaaacacctatgttacaccgacaccttcatttacctcaaaaatcacgtgtggtgtccgacacgacacttcacttggatacttcattttaaactaagaacttgaatttttctacaacataaccgagtcggatatctggacacccgtatccaagttgacacttaatccatgtctgactaatataggtaagcacacaagcaatatgccaatgtaatctccgatacctgatagattggccgagttgcccacttttccaggtccatgaaagtctttatcgtaaaggattagcatggttaacaccgcctgcccccccaaaaaaaaaaaaaaaaaaaccccaccccacccaaaaaagtaaaaaaaaagcttctgatgcaggtaggggcacaaagaatgagtgtcaaaacgagactagatttctgaactgctattgacagcttcagttgaaagttgagaacattagtttttgtgtcaacactcctaaccattgatccgaattcctgcagcagatattaaggaaaatattgatcctggtatagaattcctcttccacaatagacatgtttgaggagaaagtactagcaatctcacaggattctttttccaaataaggccaatataccaaaagccaagggccctttcaatgtcacgaaaagtctgctccccagaagctagaagaaattttatgaccgttctagccacaagttctggtttccagatttcataatctgaactagcaaaagtagcaacaaagttaccatccaaacatatgcatgcaattgttgacttagagaaaaaagacccaaaaatttaatgaggtctaacaaactcagtggcgtatccaggattgagccccgtgggttcaaagttgttcgaaaaaaaaattaaaaattattcttattctaaattactcttacatattattatattataatttttaaggaaaaagctataagaagccctaagggctgcatataagaagctaaaaatggaaaaagtatgcattaactgatcatttattgaatcgactaatgcataattttgtcacaaattcacaacttatttccatttaaggtgatatatttctacacctaattcaaggcattcaatcctattatgtacttcttctcctctacttattctgtactctaagcaatcttgtactagcatactgcccttaaaaaaatcatacttagggagttaattcattcgttattgtatcaataattcaattctgaaaagaaaaaaatggaaaaaagagcaagtgacaaaacatgagttgtagttatgggtagcaactagccagactattaggtttgtttgctgtagacctgtagtaacacgtattgtaataaaacaagagacaatatgggaaaaacaaaacatcccttgacagcttcgaacctgtgaccttgaaagagttactttaacatgccacgagaagttaccgctgagccaagctgcagtatcaatactacaggacgcatcttttttatataagcctatttcaatttcttttagtttctcattcacgcccagttttttggccagatcctggtgggtttagtcgaaaccacgatggatctgccactgaacaaactccatgtaagccaaagaagtaaattatatctagtaatgaaacaagatatagtagcatgactcatgtcaatagatgagtagtaattaatacattcaagatatcaatgagaaactagctggaacttctaataatgcagactaaaatgactagatttcataataaggactagcaaaaagtaacaaccgtgatacaaacaaagaaacgtgagagtgagtaagaaatattaccttcatcatcctgctccataacatctccttcatcctcagacgaggtccagccaccagatccgttagctttcttgccactagaagaagctacatcgtccaaggcatggcgtatggcatcagcatgctcagcatcagcaatacactcgtcaaaggcactacgtataggagacagagaacctaaacaagtcaaacagatacagagcggattcagaacaagagacaaaaaaaataagaccagttatagcaaaggtcaattcaagatgcttagagaccacaaaaggtggacgaatgaaatagaacaagtgatctttgtcaagcatttctttggctcagtgatcttttgccttcgggtttatttttagggtaaaatagaacagtttgtcttcaatcatagggtgatatataacaagtataaatttaagatacttaccatcatcttcaatcatagggtgatatggcgtctttggctcagtgatcttttgccttacgggtttatttttctcgatgtctcccaagttagtctcatcccaccttacacgtcctctgttcctgaaaagagtgcataccttaaaatatatgatgcttacataataatatgatttttgtaaatttatttattgtgcccttatacttgggacagtttgttcggtagactttgaaattcacatcctactcttttagtactagtttttttatgttctgagcttttgtaatatttccagtcaatttctctcttcctctatcctcccatctaatccattgtagcaggcacccctacccttaacctcatagaccttaatgtcctctaacttcaaccattctaaaaccttacagtcaccatctaacccccaaccatccaaactgttgaacaacatattcttcctctaattgatttcaatatcttttctttttgtctcactaatctacaaattttaagaattagctttgtcaagcatttcattccccgtggatctctaattttaatgaagacaattgtaattccaacttgatttgatttccaaacttttccagctgttcttagatttttatttgtaattgcacattgaagttaaacaatgccatcaaatttagcatcaaagcaacagtgtcttttcatattgtcagtgtcaattgctggttgttaatactccacgtggcgaactccatctttttttttacatgagagttgtttatttggatgcataatcaaagccgttctctaaacagcttaatgctggaactttctttttgcttatgagattaagtgttttggtaaaaaacaatgaagcttcgcttcttatggactatgaccataagcatattttgccatgggccatgataggagggggtgggtgccattgtatgttggcttattgtatgcagagacaagggacaatttgatgcaaaagttgattgaaggttatgtgattggtcgagcttgaaaagggtatcacacaattcacaaagttttgatcaaccaaaaaagttgccaaaagcaagagggtgcaatggtccatgctgattttctactttgttctttatatattcactaattactacaacaagtaaaaatcagatcaaaaagacaaattgcataagcagagtgacaaactaaccacgggcaaacaggtaatccagttttttgggtcagaacaatagcgacctaagcaattatccatgaatttcatctagtactaagactcacttatatttgtgtttgattattgtctacttgttttaattaaaaaaagaacttttcgtcccttggcctttacttaccaagggatcagattctttactcaccaacggatcagattattatttgatcatttggttgcatacaggacaatttaccagaaatttgcacttccaatgaagttccatttcctagggagattgcaaactgtttggttgattgtaggaagttgtaattcctgtaggaacttctattcacctaggaggactaggtaaataacttcctatgtttctgttagccaaacaacttgacatcttttgaattcctagtaatttacatttcctatgtgattcagcgtcaaccaaacgaccaataagtcagttctcacttccatgcttcaaggccttcaggcttcacatcaattttgttccttggcacaaagcacatgcatagggaaagaaaaaaaatgacagcagtattgcaactccgcaatgaactctatgtttctcttattgtctgcagtttccttaattatcttcgaatgccttttgtccttagctaataaggaccaagggttagataaacacagctctcactttcatgactactaacagcattgtggtacactgtagcaaaacacacgcacatagcacaagggagcactaaaaatatacttagtcctctgattttgccacaagggaacacatacaccttcgtacaaaaccaggtttacgtttatcatatccctcattaatctaataatctccttcaccatcttatccaaatcccttaatctgcaaactactacataaagtaggcaatcagttgaccataactacacaatgccaaatattatgttacagtgaatactcaaacgacaaacccaaaatctcctttaaccagctacatttccctcctccttatacagaactacaagaggctgaccagatatttataagaaatatacgagcagtacaaatttttaagtttagatatgaacaatgatatgtcactaacttaactgaaagaataaagagtttagagacatacttcatcattccacactaccaatcttcttgaaatgttggcacaacgcaaagcaggcaaccagcagctaacttcctctgggagacgcacagaatcaattatattaccaattttgataggagtggattcagctcaaatttaattttagctttttttcttacaggtaatgtcaaaaaaaggacagaaatgatacatttaaatgtcaaaatgcaatacatcaaacaagtcatacttgcaaaacacatcaaacaagtatgtataatgtgcctttttggtgctatatgtacataatacgtaatagaaacaagatataagtcatataacaaaactcccaagtccccaacccagaacaagaagtaacttgccaacttaacattttcaaaactcctgcacatggtcttacattttcaaaaaaagaaaagaaaaaagtacagaattccaaagaaaagcgatatgcgattacaagactagtcacacacatagtggtaaatcccagaacttgcagatggtgggtcactaccgaataatgaatatcgaccacttgtaaccaatccatgaattttttttgaaaaaaattacttcaaaaaaatatcatacccaaaactaattcatattacgatagactagtacctaaaaaattgttacaattgcgctcgaagagttctacatgttttgatattgatctgtaatatcattcacattcaattgaattaggtcaatgagattcaagtacgaacaattgaaaaaatcatcaagttcttttaaaattggatcaattaaattgtcttaatcattttaattgaagattcgacaaattaaatgcccaaaaatctaataaaaaaaacctagaaaaaggaaagacgaaattacctgagaaatgagtttctgaaacagtttaaccgaaatgacctcgataagatttgttctacagattgtgggttaagggagaagagaatagatgtagtgatgtttaatgttttctcttcggatttttacgtttggccctaaaccatcccttctatgttcttctaaagttcacctttcttcttttgctctttcttattagttctaaagttgacccagatttatcaaaagaaaaaatcgatgatatttttgctttatgtagttgttttgatgactttgtttggtcgtttactcgtttgttatgtgtagttgtaattgcttagatcatgtcttggctcaccttcggatatgggggtatccggtatcgtgtttgggatgacgattttcttttggatgttgctatgatctaattatataatttttccttttgtgggtttctcttaaaaaaaaaaaacaatcaaaatagttaattgattgacttttattttttaaagctaacataacttcatggcgcgttaaagtctcgagccaaacccgaactcgagtccagtcctatcgaggcgagctttaaccgagtcgaactcgaatagtttatgagctacgcatgctcattagcacccctacctatgtgtacttgataataggagcttttaggctattttctgagtcttctagtctgaagactgagaaagtatactcccatacccgatatgggagtacttttcacatatcatttacttgatatgattaaatgtagtccaaatatgatttaatagtccaaatatgatttaatagctaactgatatgataagatagtgttaagatatgatataagatttcaactaacaagcccccaaaaaaaacataggaaaaaaaattataattttttaatgttacttttgtcataaaaattaaataaatgccatggtattgtcacataccgggtatgggaatatcattgctctctaaagactaatgttcaaaaatcttttttttattgatgtgcgatggatgataatgatatcttgcgaattcataatgtttatgagataaggagagattcacttggataattgggtgttcccatttattctaaacgaatctatactgcttaatgtaatagcttggtggagaaaatgacagttaaaataagagtgtggattacaagaaacgtctcttattttggaagagtgcaccttgtgaatgttgtacttatgagcatacatgattattgggctccgattttcatattgcttagtaaagttattaaagacatagatagtgtgtgtagagcttatatgtggtatggaaattatttctcctttaaaggtggatatgtagcctggaatgcgagatatgcaataataagagtacatgagaatgggggtttatagatgtttttttttaatccatatgagtcacgaaggcagtacaaagtacaaagaaggggagggggaatcgaacctgtgacctagttcacatcacctcaatcttaaccactaggccaagatatccttggtgggtttatagatgttaagaattgaaacaaagcaagcttgggtaaacatgtgcaggcaataacaacaagaaagatggtatttgggtgagacgggtacattcagtgtacataaaagcggaggattggtgggattatcatcctactagttggagtagttggtattgaaaaagaatatgtgaggtgaaggagcaaataaagcaacactaaagtagacaataaattcaataaatcaaaagatattttattgtataagatgttctgaataaaatggtagtgttaagacaacctttgcaatgggaatcaaaattactatatctgaaacaggctcaatatgaaaaaatttaaactcatgaattagttggccatgagaggaagactccacaccgctgttaaggtactagtttataacagtactgcttttacagagtgttggatttgtggtatgaaaattggaacttaagaacatctcatgtttacatgctgcttcagaaagcaaagtatgatcaagattaaggaatggatggcaattgattcccccaatggaggatttgtatggattggttagatggatttcaaattgcaggaagtctaaatttcaacgagcaccttataatacaaccattgcaggggcggtgtatggagtttggaaagcaattactagtagaaaaatgaagaagggttgcgctgaaaaaggcctgtagggctgcgctttttgacagcagccctttcattagcagcccttcactttttaagtagggctgcactagaaaagcgcaacccttctcaacgaagggtcagctgaaaaaaaagtgaccccttctgaagaaaggcagcgctttttagggtaaaagcgcaacccttctaagctagaagggtcacgcttatacctaaaaagcgcaacccttcctacccaaaaaaaaataataaaaaaaaaatttcgacatttttttactcataatctcacattttctgaaattaaacagaagagaagagaaacgaaaatgaaaatactaaacccaaaacaaaaaaaaagaacgaaacgaaaatgaaaaaaaggaacaaaaactagtatataaaagagaagaaattatagatctgaaaatacaagaacattaatcaaaacaaagatgaaaatacaagaacattaatcaaaacaaagagaagtatacaagaacattaatcaaaacaaagagaagtatacaagaacattaatcaaaacaaagagaagtatacaagaacattaatcaaaacaaatatacaagaacattaatcaaaacaaatatacaagaacattaatcaaaacaaatatacaagaacattatagatctgaaaatacaagaactacctccaaacattaacctaatatgtttaaatacataaaaaaaaccctaatacataattaaggaaaaaaaaaatttcggaaatacttaaaatgcctatttggaggcttaaacgaactcgaatgacttaaaaagcctaaacgtcacggcgtagtggtgtgtttgactcgttggcccgttccgcttccgaaaaggtatcacaataggcaatcggactccgtcggcatgattagtgcaaatcatttcaggctttttgtcgcaagtttctgggagtttttgagagagaagagaggatgagagagaaggaggagagggaggagggacgtgagagaaggaggaaaaagaataatgagggacgtgagagaggatagagaatgagggataatatatttgacgaatcccgcttaatatttgaagcccgcgaacttttttatttcaaattttttcaggaagggctgcgcttttttaaaaagcgcagccctgagaggaaatagaatcatcagattcatgtttgcaacatttagttagatggataagagataatgttagaggaaggatcttcattgttttgtccaaaaaggtgcctatgagaaatttagattggttttactctttaagttagaatgattgtgttttgatagcgtatgattgtttgtttgcttggctaggattgaaagggtccaacctaattggttttttcctccatagtttggattaggctgtgaatttggttggtgttaatatatatatttctcaattgcttagaaaaaattaaattcattgtttcatcgcttattcaattgtatccttttttatactcgattgagcttgttacttgtacaatatttatttacatatctaaagatatgatatcatcttttagagtaattcacatgaaaaataaaaatatttaatttcttatgagtgataactcgtttttccatgaacaatttagttcctaaaaacagttgtggaaaaagttaacctcataagcattatacttttattttttcatttaaattaaagattaattggtgccacacgcgagttcatagtaactaggcattagaaatgttattttcgaataatccaacagacccgagacaaacttctagtttgggaaaatacgtcctgatgaatatcggatattcgagattttggattggatatccaataacaaaagaagataatttcttttaaaaaaaaaaaactcgaaaaaaaaattcagacatgatcagatcaccaaatgttcacatatcctattattaaaccgaatatttttttttatttttgatcgagtatccaaaaaattcccaacgcttcaaatatttttggatactcgaaaattaaatttccgcatcaagaaattctcgaatactccgatatgtatactcgaacatcaaaaaataggaaagaatatccgacttaccatattggattgaccagaacacataatcaatcggatcaagtatttacaaacaccccaactagtcaatagtcatgatgctatacgcaaaggcacgttaaatcgacatcataacaaaagggaacaactattccaaaatactcaatatatttattgaaatttaattaaagaaaaatcaccattattaatcaagtttaaccaccagattcaaatgctgcatcccaattctactaattcaagatcattcttattttttcttgacctacatttttaaccgcatgaattaaatacataaataatctatgttagttttcactataaccatcttgtattatatatacttgatgataaaattgctgacacattatcaaaattcatttcttattatacttgaattaacgatacttatattcaagtttttcattaacaaacgtgcaaaataaaaataacataagtaaaataaatttgggagaaattagaaatatgaaattagaaatatgaattactaacatgaaaaccatcccaattcccaatttccaatttcccaccctatcctacgaaaacaacagaaaaggccagtgaagaaaataggttttacttgtgaggtggacataaagcccatgtaccaatatactgtttcctatatttagagcccaatactaacttagggtttttacgcgttataagttataaccacctcacaattcatacgcatatttggctcttttagggtttctcaaatcacagcggagatttctcatcagcagcaacagcaacaatggttctcaagtaagtctctttctctctcttctttcatctagtattcttggtatgaaattcacgattttatttggaaatgagtacttaataatctgttagtttgttttttctcatcattcatgaaataaaaactttgattttatattttcgcgtattgtttttggatttttgtatgacgatgatgatgaactttggagttgataatgttttttagccgacgattatgtatgatgcaggaagttagggttttttcgcttttgtatattaataattagggtttgtcatgttcaatatctttatcattgttagatttttcactttatttttagaagttattgaatgacctaaaagaagttcgtataagaaggtgaatttttactttgttgaatgttatgcacattgactgttttagatcttggtggtagaacatgccattaatctctagaataggttgaaggttaaatgaagggaatttgcattccgattgattaggtttttgagtattttagggtgttaaggcggatcttcagctatatatatgttaaaagtatgaaaaaccttttgttattgtttgaagttgattggataagcggttcgagttattacacggctcagttttgtgcttttagtgaatctacatcactttgattgagggtttccacatttttgagtatagattgggtgtattggctgagcaagattgtttgatctcctataatgtgttatttttgagaatacagagtatctgctcttttactctgcttgtctattgattgtcttcgtttgatagaaatgatttgcttgaagttgatttttgaaaggggcactttgctcctgttctgataggattgatagataagattagagcttattgcaacttggggaattttggattattgatattttctttggtgctttattctttgcttggcaggactgaactttgccgtttcagtggcgccaagatatatccaggtaggggtatcagatttgttcgtggagattctcaggtaagcttagtctgatcacttttattatttcatatcttggctggctttcttttatagaacatgtcaatctaactagtgatttgatatggcaattgaaggttttcctctttgttaactcaaaatgtaagaggtatttccacaatcgcctcaagccagcaaagctttgctggactgctgtctaccggaagcagcacaagaaggtcagttcataaatttatttttcttttctccatgtgatgtttgaatatgatcaagtgtttgcttgtatctagtatcaagtagtatagctcctcagtttttgactctgtttcatttgtaggacatttctgctgaagctgtgaagaaaagaagaagagcgaccaagaagccatactcaaggtctattgttggagtaactttggaagtcattcagaagaagagaagtgaaaagccagaagttagagatgctgccagagaggctgcccttcggttagctttatacttgtgttttgatcttttcatactttattagtattagcttagaagttgatgtgtattatgctctcctattttgttagtgaaatcaaggaaaggatcaagaaaacgaaggatgagaagaaggctaagaaagccgaggtttcagccaaggcacagaagtcgagcaagggtccatcaaagggagcagcacctaaaggccccaagcttggaggtggaggtggaaagcgataaattcatcttacctagtgctaccgttgcatttagttgaggacagtgcaattttgggtttttatatgttgggaagtagacgtttcttatttgctacagatatctatgtatttccaggattattttggttatgcgagatacaaatctttatttttatctaagctgtgtgttatgtacttgggtgatttcgttggcgattattatttttggtgcctcactaattcttctgttagttacctctcaaggcacgcaggcctttacttaggttaaaaaccctttgcaactcttgtccactcaaattggatcatttaagttgcattgcccatcccattcaaattcactttgatttaaggctgttctggaggaaactatatactctgttaatttgttgatttaaaatattttaagcatcatcataggtcgattgttattgtccgtgggcatgggcgcatggtggtaaaagtgtctactgcccacttaaataccatattcatcagaacaaaattctcatgtttcaggactgttgcttttttgagtggtttttaggtctggtacatggtgtttgaagctgcatgatttgtagcaagtattaccatcatattgttctatgcagtgagtacgggcatgtaatattggccttggtgcatgctcttctccggatgatgaccacattctccacatctgcacgtttatggcactgatcattgttgataccgtattgggtgcttatcagggtgctgagctgctgactgctgaggactaataaaaacaagcacaaatgtgtgggttcaagataccatagacaacgttatcctctcccagtaccctcttatctagtcaatgatgaaccacagtccataggtccacaacgcacaagttgttatacgtgaatacgtgattgacctcactctatgcaaaatttgtatagtgtgtaccgtggaatgaaccaaatcgcaaccttgaatatgtgcattataattaacttcttgaaatccagcacaaaaagatgatctcccttagggcttaggacacatgaagttcacaattcattacatttttctgcaaagaacttctattttctttaccatgtgaaacgaatctccagaaacaaaccatattaccttcatgtaaagtaaaccaccactataatacgtctataacattgcatttcaggcaaaagacccctattaagcaacttttgtgcctaaacgactaataaactaaaaccagataactgtgttgataaatatgttacgccttcttgctgctgcttataagtgctctcggcctagtcttgaacaaaatcttctgcctaacaattccgatcacatccaactccatgttcgtcgatgattcggagctcctgctttgatctccatcagaatgtttcactttcttcagcaccaaaagtggtttcttcaatgtgacctttgatcctgttaattcgtggtaccctattgtaaacgtgtatgattcctgtaatagacggaatcaataattatcaacaaatacaagaaactatcaactaaaataaattcataaaacatccatataaaaagggcatccaactcattacacatacgatcacttctgattttggttccattctaatcaaacttacttcttccgtaacaaaatagatattacactttttcaggaaacaatctctctatatctgtctcctattacatgggtccctttttttctttctctacttctcaaaaaattgcctagaaaagtgtatttttaaaggtgtaacatctttgttaaggagaaattatttataatagctagaaacatagccatcgagcgatttcaccttccaaagtgcccaaattatacctatgtaaacttaagttataactaaacatggaaattgacctattatttagggacggagggagtatcatttgagaacgtgccattatatcgaattgatcactagagtataatcaaagaaacaaatcaaaacattatatcttaaataagaagaaaatgcaagaatgtgttgaaaaggctacctgagaggaaggacggcaaattcgaccgatttcgaggttttgaagattgttctgaacttcctcagattgagcttcaataacaccttgcaactctatgattgcccattctttacaattcttttccccacacctgcatttcacctctattggtcccatttttcctcacttctatttcttcaaagaacaaaaaaacaaagcttatattaaaaccaagaatcaactctacaataattccagaagaatgagagaaaatttatgttaagtagtatcgatttgttccgattgaaattgatataatcaatttttgtttagaggggaaagtgaagtattacttgaaggagaaaataggagagagagataagaagagaggtcgacgaccacacctgcaatctctaataattggcggcaaaaatttacttttgcgcgcgcttttatgcttggaccttaatcgaaacgatgtcgaattgagaaaggtagattttatgaagtttgagttttgtcctttctttttcaattgcaaccttttgattatcgtttaccaaaacttggcaaaaaataaaacctttgttgtgagaaatagagagagaagttatgcaaatatatcagagagtattgtattgcattgatgtgaagaactgatttcttacatcggtatttataggcaaaattatactgtttttaacattacattttcaacgatttctgcgcagacgaaactttcctaacatgcagtaaatgcatggcatgacattcactatgcttgaacagtgaaattttccaattcactgtttctcaacaaccttttgattatcaggattgtcaacacacgtaaaactgtaaaagaattaatatgccgaaggtatacatcgacactaatctcatacttgtcagtttctttttatataccggagagtgataacttatttgcagtctattagatggatggacataattgtatcagactaataaattagtatcaattttgacttatcaactcaggtgagtctttctctaggaaggatagggtttcagtgtgagtagacttgggcatgggccaggcccgcgggcttggggaaatggcgggatgggcccaagcccgtgagtggcgggtcgggactgaaattttcagattttgtccatggctcggtccacgcccgtcggctcgtgcctcctacgggttggcccgtgttttatgttgttttttttggatttttgacagttttaggctaaaaaacaaaggaaaagagtgttcgacccgcgggccatctagacgggtccgtgccgctgcgggcttgaaatgaaatttcttgaacgtgacatgtccgtggtccacgtagcggacaacgggtcgggcccgacttgagcgggctcgtgccggcccgacccgcgtgctagccctacccatgcccacctctaagtgtgagtctcgacagccaacctcgttaatctctcttgggatctggatcagtcttaatggctgatcatttgattgattgtgtctcgagtatgaaaaataacggaagatgaagatttggtggtggaattgggaggaattcaagaggagtcaacaaatgagtcgattaatcttgcgttggtaggaaaagtgattacttgtagatcatttaattttaatttgaagccctaatgaaaacgttgaatcaaatatggacaatctcaaaaggtgcactcttccaccaaattgagaatagacattttgttatccaaattgaccttggaattctgataataatttagtgatgttagaggaaatcgaaggtagtgtacaaccatcaaatatagccctaaatcgatgcccgttttggcttcgactgtataatttcccattgaataacatattggagaaatttgtgagggtaattggagacaatattggggttgttcttgaagtggagtccgatggtgtggcatgggacatgtcggctaggtttaaagttttgatcgacgtaacaaaaccacttcgtcgaattcaaaaaatcaaaacgaaggaaggaggggtggtaatggtggagatcaagtatgaaagattgtccgtgtttacgatgattgtggggggtgataggacatatagagtgcgactgccaagaggaaaaagaggaaggtaataacgttgaaaaacaatggggtactaagttacgtgcttcgccgcataagggtagagttaagatgtcggatgaaatgaaagctttcttgcgatgaaacacctatcctttgggggcacctctaagctagggaggggtgggtcaagcagaggataagtacgtaagtggaggagtagagaagagagtgacccttaatgatgctcaaaagagttcaatgatggagggatatgttgatgtccagcctcgttcagaagaggccttgattcagttttagactacaaaagaaccaacatcctctctctcaggtgttgtggagagagagatagaccaaaataatattaggcccgttgcgaaccacgttgagcagcctagtggagaaagtgaagcgaggagtgtgaaagtagtggctgggagtatagtattaggggatgtagggaagaaaatgagtactgaaggccttgagggagagggggatggaaagaataagggggaagatggtatgatagtgaagcggaaagagaagctaggggtagtagaggtggtagggcgcaataataattttggtattgaaatgacagattaggggggttagtgtttagaggcgaaagtggaggaaatttccccgagataaaccaagggttttggcacaagagaaggaggagagtggagtgggaaaaaatggcaatggtgacagaaaggaggagggtggtcttgtcgtagtgaagaaacgagttgtggatacggctgagtatgaattggcgagccccacctcctgggccctcgatgaccaatgatgtacatcctttcatggaattataggggcttagggaatgttcctgcaataaatgcgttgaaacgcatagtacaacttggacatccccaaatggtgttcttatctgaaacaaggctaaaggtgggtgagatggacaaataaaacaaaaaataaaaatgaaaaacatggtagcagtggactgtgtgggaaaagaaaggaaaaggagaggagggcttgctttgctatggggagacatggtggaggtttgcgtgacgtcttattcgacgaaccatattgatgtgtggcttaattctagttagtatgagaagtgacgattcacaggtgtgtatggacatccggaggaagatcaaaagtagaggtgatcattttggcccggcccgctggcccggcccgtttttgggccgggttttgggcagaatttttcggcccgcgggccgggcccgacccggtcgttttttttttgtttttgggcgggctttgggcaagctaaaaacgcctttttagtctattttttggcccggcccgttttggcccgcaaaagcccggcccgaaatagcgggctttggacacaaaaattcggcccgaacttaggccaggcccggcccggtcaatgggcaattttttttggccccggcccggcccgaacacggcccggcccgaacccggcccggcccggcccatgatcacctcatatcaaaagtataaaaccggcttattgttagcacaacttcaagaagatcaacatgaaccatgactttgtggagggatttcaatttgatgatgatgtctagtgaaaaaaaaggtggcaaggatttttgggttgaacatgcagaaatcctaagacaagctgtagagaatgcaatttcgaagatttgggttacattgggcatgaatttatacttggaaaaacaatagagggggtgagtataatattcaagaacgacttgatagattttttgctactccaatgtggcggcaacaattttcgcaggttcgtttgttactcatttgtccaaacgtaagtcggatcatctttcgatcttgttgtgtttaaaaggcaatgttgaagcgaaaaagaggaggaaaatatgtagattatttcgttttgaagagatggggttgggggatgaaaattatggagacattgttggtagtgcgtggagaggaggaggtgatctttgctcaaaaatttcccacacctcttgaaacatgagtgcttgggggcgcaagaaattcgaatattcatgaaggagatggcagactgtagaaagaggatggagcaactcacgacagaagatcaatttgaggaggttattgctcaaatgaaagcccttgatgacaggataaatgaactcttgtgacttataagaaaaatggataatagttgaatcccctcttgtgaaacatatatataaaaaattaagcaaaatacataataattatattggttttgacaaattttgtgtcgctaataaagaaaagtttcgttcaaagtcctcattttggacagattttggataactagcttttcaactttcatccttcacaatgcatgtgaagatttcatcaaatgacatgaatcctgtcatattcctctgcttcttttcactcgtcacactttgacttttcacgtttgtcgatgcattattttgactattagtatccttaattgtgtattagatgatataaaaatatgattttatgaaaatataaattgagacgaatccaacaacatattacattataacattttattttatttaatagtaaataatgcatggtcatcggtcactgatgttaaggaaaattgtgatgctaattttaggtggtggcaagttggacatgatgttgtggagtagaacttacaacatctgagattctgagtagaactgacaacataatcactttagacattttctcctaatagatttagttatgttttattaatgtctaaaatgtctaaaataaaaaaaaaaaagatgagagagaaagctagaaagaggaagagagaaaaaaggcgattgaaacccccaaagcccccccgagaaaccctagttcttcagaaaaagcctcttcagaatttggtcatctcccttttctgctgtaaattaagaacttcttctcagttcttttgtctctattgtcatctcaatagtacggttctcctttcgtgttgggtaatttatccaattggtttgcttaaggctattaaagtttctgctagtagcagtaataatcatcttctaccctataattgtagggttagcgtgcaattagagtgcttttctatagcttttaatgatgatttacagcctggctgtggttatttggctctaatttcagttgagctagggttttctcttagaattgggggtttttattggaaatcagtatttggggcatttaatgtgtggcaggtgagtggagtgaagggtgagtttaggagggtctcctctgtgttgtcattcattgcgggtggctgtttccccttaaatcatttggttttttggcgtgctgctcatcaagtcttcagaatttatgctcagaccgaaaacctagcattaatggtgatggtaagtgtctttggtaaattttgtgttaagatccttcctttagttcgtttgcaaaggaggttctatataaaggagttaacggtatgtgttttttcatcatccttttcagttttctcttttcaagttctagtatttaagactattatctctccgtcctctttagtttctcttaaattgttttggttagcttttatgagtatgaattttaaagaggctgttctggagtcaggaaactctaagggaactgaggactcttctttggtttcccctagagtacttgatgacagttcaccctcaaagagactggtttctgaaggtattctttgggtctgtctctcaagaccctcctttgatgtcttgcctttcctaaggcagtggttgtggatgagcttgctcaagtacagcaagacatcaaagaacttactaaatcctgtttgattggtaacatgttaggtgaacctcttgatgttcgtactattatttcacgtacaaaatctgaatggaaatttgtgcatggtgatattgattttttagagatgggaaatcattggattcttcttaaatttgctaaccctaatgatttggctttagtgtgggctgatagaccttggcatgtccaaggtgacttgtttgttcttcaggcatggcgccctaactttgaccctttcttggaagaaattaagtgggttgacctttgggttcgcatccctaggtttcccactgaactcttgaatgtagagtctctttcaaatctatttgcagctaataatgtgggtgtgttggttaagttggatgctaattctcttttgagaaataaaatcagatttgctagagcctgtattcgtgttgatattactgaacccctgcttgaatatgctgaattgtctcgagctgatggtaagaaatgtggttatgtgatttggtatgaagattttagtgtgggttgttctttttgtggttttgaggatcactctattgatgcttgtcctttacttcatgctcctaagaaggaggttactgtatctcttttgaaaagtccaaagcaaaagtgcttagctgagatgatatctctggcttctaggcaagttcaccttgctaccagggctgtggaagccaatgtggtgcaagctaagcctaagtcagtgcatagaaatcatggttctcattctgtccctaaaaagtatggtggctttgctaagtctatttcaaaagtggcaaagaaaaaagaggttggtattaagtttaaagaaacagacaattattttaatactgcattgctccagtgcatggtaaaggtaaaggcaaagcaattgtgtttgcctgcctcgccctcagtatgggtccgatagtgtttcgatgatgattctcaaaagttggcttcccctcctattttgccctcctctcaaggttttcaggcagccttattagagtatcctgtttctaaggttggtgagggtgtaggtgcttgtttttgctccacccttgggctggcgacagtggcttgtctcctgtccctttgcaagttctttatccaggtgagtttgtgcaaagataatcaatttggtcctctgatgcatgtggaggaccagtcatatggatttgctatgtttgagtctgatattgaaaatgatactatgattcttcctgaggatgagaaagctggtgctgtatttactgctatccatgagtcttctttccactctattgattcagcaagttctattgtcaagcatatcaatgccttgggtgttgagcaggagctccctatggaacccacctctctttcaagtgccgccaagaggagaaaaggcaataatgaggatgacaatgcctcttcgattctcaagaaaactagagcttagtatgtctgtttgcgtgggtataatttttttgggatgactatttctaatgtttttatattgagggttagctggttcaatagggagtttttagatcattttgcattagtcagtcgaagttttttggtttgtaattatttcaggttctgtaatgctatgggaaccctctcctctaatgttctggtggttgatatggcattggagggctggtttcccatacttagtaggttgctcccctatttttgttccctctgtcatccaggtgtttgatttcctaaagcaggttcttcttatttatgtttcaatgctgttcaatctaagtattcaaggttatggcaatctgccttgtgtgaattcagtttttgggaagtttctttatttggcttctatttttataatcctgactattaatcgaggctgtgacgtgggtagttttttatgtatttttgtaagattggttggcgattatttctctttagcttggtatggcttatgtagttatgatttttcacaagataagttgcgagttttttttgctagcaggtttctgcctgcctcccctgcccgaaagagcgagggcgtcctgcctctcagttcacctcctgcatcctaactacaaagattataattagtttcccatgtcttggttccttttctggtaatgagctgaaagacttgtctctggttgaggtcaagtggttggctatcattattcgctaccatttatgctggcagctagttgcaaagaataagtatggaaggtttatgttaataatatatttatgaattttagtttttggaatatccgaggttgtaaacgtcatttagcaatggaagaggttaaggactttagtatagctaaccatactcatgtaatgatgttatgtgaaacgaaaatacaactccctcccgggaagggacattgcgccattgtgggtatcaacatggtgattttatcccttccttaggtttagcagggggaatgtggttaatgtggaaagataaccctagcaatccgttctctttatctattctcttcaaatctgaaagatttattgcgtgtaatattgatattttatcaatggattgtaaatttgtggcaatttttatctatgcccccccaaatcatactctcaaacagcaattttgggaggagttaaagttgtttttattatctctatcttctccctttattattttgggtgattttaatgaattaagtgcccaagctgataaattaggaggctcaccttttagattttctagactctctattatgaattctcttttctctgatattgattgtcttgaactcccctttgaagggaattcgtatacttggcggaaaaaagtacacggcccgaataatatttttgagcgtatagataaaggagttgtaagtcttgattggttgaatcttttccctaattcgaaactttttaaccatattttcacttcatccgaccattgccaagtatctttgagtataaagtgtagtaatggtagaaaagctcctccgttcaaatttaacaaactatggaccactcgcaaggactttgactgtttaatcaagaaaacatggtgtacccggttctcgggttcacatatgtattgtttgattaagaaatgtaaactactcaaaagtagggctaagacatgggctactacgcgttttggtaatatatttagacaacttagaagtgtggaatctaggctaaaatctattcaatgtgatctagttcagaatggagattgtcctattcttattgctagacaagaaaattttttagcaaaacaggttaagctcttacattttcaagacgttttctggaaagtaaaagctaaatcaaatcatataaaatttagtgatgctaataccaaatactatcattcgtgtgctactataagacggaatcgtaaccttgtaaactctattgtagggccccaaggggaaatattcactcatcctcttcgtatagaggaatgtatatctagtgcttttaaacaacgctttatgtccaattctaggtgctctttcgatatagataatgattttcagatactggaagaaattatctctcttgaagataatgagttcctatgccgagaagtctcttatgatgatattaaagaagcaacttttgatttagctcctgataaatctccaggaccggacgggtttccccctttcttcttccagaagtattggtctcttgtaggaaactctattgtccgagctgttaaagcttttttccattcaggcaaaatcctaaaagaaataaaccacactttcataacgcttatcccgaaaattgataatccatcgaacccaaaccattttagacctattagtttgtgctcaacgatttacaaaataatctccaagatcatggctaatagattgaaagttgtgatgggaaaaattattcaccccttacaaggtgcctttgttcctgaaaggttgatccaggataatgtgcttctagctcatgaagttttccattcttttaaaaacaaaaaaggagcaactggttggttagcaatcaagttggatatggaaaaagcttatgatcgattagaatggaattttgtgtttgctactctagaaaaactgggattttgttcaaaatggatagaatggattaaacaatgtataacaacagtaactttttcagttttggtgaatgggattcttggggagtctttctctcctcaaaggggtatccgacaaggcgaccctctttccccatatttatttattttatgtgctgaaatgctagctcgtcgattctgacaagccgtcttgggggatcgagatctattggggttactttaggacattctagaattaaaattccttttctaacctttctttgacgatacaatgatttttgctaaagcgtctgaggataggcgtcgtataattagagatattctagataaatattgtgtaatgtcggccacttgtcaattttcataaatcgcttttcaatgcacccaaaatgtttcgaaattgtgtctaggaatttctcggaaattttacagatggaaaagtctttttctcttgggaaatatctgggctgccctataattgacaccaaagtaacaaatgctacctttgcagatattcaagagaaggtctcttctcagttgtccaaatggagagctaactctctctcccaagcagggagaacagtcctaattcaatctaatctagcaaccaaagcaaattaccaaatgcgagcttctctttgcctcctacaggtcctatcatcgcttgataagtgttataggaattttttttggaataaagcatcggatgtcaagtctccaaatttgataggttgggataagatttgttaccccaaaaaatttgggggattagggctaaggaaagctaagactaataataatgctttgcagtttaagcttctttggaaaataatagatgctccggaaaatctttgggtgaaattagtgacgaaaaatatcttaagaatgatgatctatttcaatataagcttaaggctaatgtttcttgggcaggaggaagtcgatgggctcgcgtagttgttttaaaaaaggggttgaggtggatagttggagatggtgagaaaatttccttttggtttgacaactggatttttccccatccgatttcgaaatttgttctattcccggggtactgagcgctttaaagttagccgctcatttctcaagaaggcagatgggataaaggtcttttgagtaggtatgttccccctgatatatgtgtacgtattgctgattactatttacctagtaacagaatgcaagataaaagggtgtggggtctatccccggatggatgttatactgtcagatcaggagtggacctaattcagggtttacatctaaactcagttgaaacgtgttctttccaaagggatatggcaactcacggtccctcctaagattaaatttttcctccggaaaatttgccgaatggtcttcctacgaagaaaaggcttgagattagtaaggtcttcttacctttggaatgtgtgttttgtaattttcattcggaagatgcagctcatctcttttctaattgcccctttgtaatagatgtgtttgaggagttgcatgacatctggaattgggccccccctcctgtcattgggagggacgtggcttttatggatcacttacagcatctcaaatctactttctcattgcagcagctgggttatattactattgtctggtggtttatctggtatactcgaaatggggtggttttccgtcaagagttgtcctctcctgtaaaggcgagcttgatgatcagaaactatgttaaaaatcttaatatggaaaggaaggagacttcagttattgatacggctcttagtttgtctggtaagcattgtattggtaaagctattagagataaggttgcttggtccccgccgcctgcagggtactataaagttaattttgatggctctaaactttcgtctggtcaggcttcttttggttttgttatccgagatggcgatggtcatgttagtctctgtggggctggttgtttagatacttcggattctattcttatggtcgaggctaaaggtatgcgagaagccattagaggggcaaaatctttgggtatctctaaatttgttcttgaaggtgataacttggtggtgattaatgcaataagaaagatttggaaagttccttggaatatctattccattattctagatgcagataaggatatttcgggttttgatgatgttctaattcgtcatgatttcagggaagctaatgcggcggcggactggatggctcatcggggtcatgcaacggttaacacaacttattggtttgatgttcctgatttaccctttgctttaatcatccggaaggatgctttagggtggcccaaatcttgggatccaccctagtcttttctttctttgttaaaaaaaaaaaaaaaaaaaaattgtaatagcttattttattgtctttgatgtagttgaatcagaacataccaaaccaaagggcttgggttcaaggattcttaagcttctattcactcatttacagaacaattaacatcagatacatcccctcaaaaacaaaaaaacatcagatacatctattacagaagtttattgcagttaatacacacctgatatcaggtacatctattagactattacaacatagttactgtttgatatattgtcattattcattaacatgttacaagagaatgaaagaagttacatcctaagttctaactagtgttacttggaaaatttaatgatcaaaggaacgaaaccaaaccaaagatcctattctttcaaatgaaagatcttccttacattttctttcctccacattgtattatacctaagtgtttgaaagctcgaagtagcaacctcttaaacgcccaaagaactgttgccagtgagagtttttatcgcaaaatcgatgcatggatcatcgaacaaatccacaaaacccgggcattcctggccttcttcctttggcttactctcagtaatgctcatattgctgcactctagtgggaatggctccagatgataaggccttgtaacgcttctggactcccaatcttcattctttacaagggaatcagaaggcatacaagactgcttgttggagtttataccattgtctttgcatatgttgacagcaaacttaggcttcttgttgctgttattagtccaggtgtctgacagtttttctccaagaagggatccaatggctggagcagaaagatagactgttttagctccatccttttccttgagcattgaatctatgatttctgatagattcggaatgctgagtccgctgctgtcttcacctgcaacaccaaagcaaacatttgattattcaccacattttgattgttttatgcacaatttgtaagctagaggtggccactggctgggccgggtcaagaagttacatgattgcaatagacactaagcttagtaagctatgttatgcaggtagatgggtcactgaaaaatttggcgcaaaattaattgggttaaacaggttgggtcaacattggccaggcggaccaggtggtgagctagaagctcgaccgtggaatggtacaggccaggatgtgcccaggcctgacctacgtgacccgatcccaaactggccctggtggctcaggttgacctggccctgtggccacctctagcagccaatttttttcttattttaatagcatacagtgatctggatcaagtataaagaaaggagtggaatctcttctcctcctttgtctagaagtacttctccctcctttcgaagatctactgatcgttttcttctctatctcctccgagtctttagctccggctctttctctctcaggtttgctcttgtcttttttcagtccttgagcagcagtttcacataactagtacagaaatgtgaaatctgtaagtgttgactgcaacatctagtagcaccatagcaataagttttccaagggagaaaattacctttttgcctccattcgacttgatcgatttcttcttttttggtacatcctttctcaacagcaaagaatcaacacaattaatatacttacaaatataagtaacaataaaatctactctaatccagaacttaatggtactccctaataaacatacatcaatatcgtatattgtggacatcaaagttgctaattagcatacttacagtatgctgaatagaaatcatttccgtgctgtcgctgtctaagcctttcggtttgttcttggttacatgctttcctaactttcctgatagaagatatcgatcaatgtcctttagagaccggaatatatacccatttacaggatcagtgtagtactgaaaaatgaaaagatgcttacattagattttgctgatgaactcaggagcccagtaaaaggcaaaatagaatatactagtccatagacctacaaaatgtgcctctaatcttctcaatatgagataagatgattatgatcatgctaaaacagtaacttgctaatttacccaaacaaaaatagacatgaaacactgaaagtaacaatttacatatgttagaatcactaaacctttttctgtactccatttgttccatattggcttacatagtttctattttggtgtccaagacacatttttgaccatctatatctttaatcatgtatgaataaaagcgaacattgagacaaattcaacaagataacccgaatttctatgcttcgttctaagtaccagtaatttcttggactaattacacttgaacaacaaagaatcatgagagaaacagagatacaaaatgtcagtcaagtgatcctggtctaaatgttatgtaactagtttagtggcttaattactattccattacaccacatattcatttaatttactatatatcagttcttctaaaacacattatccatttcaatgctggaatactattaatcatcatctaaactctattgcatgcagctattagttctcactaatcctgtaaaaaaaactatctttatatcaacaaaaaaaacacccataaaataaatgaagcattaatgcatgtatctaaaataactaaatctaacaacaacaaaaaaaatggtcacatattataagcattgaaattaacaagaacttaaaaaatggagatttagaatttaaagtttactctatcttttttgccactttttctaactctgatctcaatcttccatccttctggcagccattcttcactcctaatctgttctcccataatttctttgtttttttcttggataaatttacaataaactcactcactaaatcacttaaatctcataaatttcttcccacttttatgcttatttctgtctaaaacttaggaacaccgctaaaaactcaagtttgtttaactcaaaaaattccacttacttactcactcactctctttagttcactcactttgatcaggtgccctgtttgtttttttcctttttatagtattttttttgtttgttttagtgacagataattgagcagttttatagaacaccaagagagttgatatcacacgtggatggtaccaaactcttagtaccagatcacacagaatatctctcactcactaccccacgaatgttgtgcatatgtgagttgtcccacattgaagaaagtatcacaatataagcgagaggagctactcctattattgccaattaattttagtatggaacctcctttaaacttgtatatatatggaccgaaatctccttctccgtactgaattgtcttagacgacttccagttatatcaaatttatcatactctttctctttttatcaaaattcttttgtcaaagaaaataaagagtttaagttccaaggaaagacaagagcatcgttgctccactatcttttgcaacttctttctctcgtgttcctcgctcgatcaatataatctcatcaactcaggggtgcgccaaagtttgtgtattatgtcttgcttgccaattgtcgtgtttgatttcttcaaccataatgccttccttaaacgtgtcttatgtgacccatttctttttctattagtactttctaatagactaatatataataatatatattttttgacttccttttgggaatttatggtaagatgaataaatatcctttggactgccctcgcacagggctactcccccagaggcctagtacttaaccagagggagttgttcatcttaccacatgcttagatcaactgacaagggagttgttctagcttaaccaaaggtttcggcttcgagctttgaaaacgcagccgtgtgtgctggaatagctttcccctattggggcctgacccggctcgaatccggattagtcggatccaaaaatagatttcgaaaaactgcataggattcacaaaaaaaagtaaataaaaaccgagggagtaatatgttcgtcttcttaaacattattagtagccttgtagtcatttgatgaacagaaatgtgatttatcaatacgttgtcttcaatttgcatatatatgcacacattatagcagtaggccatctcaactgtttgcacaagttgcaaatgcgcatatagagatatagtagtttcctaattcagctcaacaacagtaacaggcactacagtctacaattaggatttggaccatagtgttaggtgaataggcgaggattagttcacttgtagctgtcttatcaaaggaaaaaagaaagctattacatgttacatgaaagggtaattaaagaagcttaacttgagatggatattttttagaaaagtgaattttggagtttcttgtatatggtttaactagaggtcgataatactttctctgtttctaaataagtgcaaggcttcttgttttcacgtttgccaatgcattattttaaccattaatattttcgattatcaataagtaaaaattataaaaagttgatataaaaaaaattcacatttagacgaatctaacaagatcccacatgactatgttttccctaaaatttaaatcaccaaagctaattaaagtttaattaaactgtgaatagtaaacactatgcaaatactgcacttatttaattatggaggaagtagttcattgcttttttgaggataggaaaataattttttgtgacaacaattccaaacaaaaaaagcaacataaacacacacaacttactccagctcatttcgatctccttcctagctaaaatgataggtagtaggctggttgtaccacgtttatattctaaaagaaaacgcgtcaaaaaacatttttcctatttctccaaccttttttctgtaaggaattcataattgtattttctcttgaaaatgcaattgtttctatagaaattgttttttcatggaaaatctttcttagattagcaaatcgataaagtcggtttaacactagttacgttcaattttattataggttcattttcatattaagccaattttagctctcgtttcaactaatatttaaaattcaatatgtaaattgagttcaagaccctacattttcagacaaatttgatatattgatgataaaaatttgcaatgcaaggctttataatggcacttgtaaaagtgagccatttgttttaaagaaagtaaatgtctaacatatttttttttttaatttatttcatttcataaaaaactcaaattagagttatgagcaacatcaaaacaccaagactacacacccctactatcatgacaaagataaccaacatctacatccaaacaattccaaaacgacaacaaccccgaaataacatgagcactagaacaagataaacaacacactcctaccaattccatacacaagcaacaacacccaacattaacgaccaccacaaagctaggaagctcaggacaacataaatgaaacatctaagagctcaaaaaacccataaaatatttttaatgacatgaacaccatactagctagccactaggatatctcttactagttactacaccctctctttactacttggaccccatttctcttctccattatatgatggaactcaggatgatgaagaatttgagattgatcattcttctccaagttatgatggagtcctaaatggcgaagtaattgacattgatttttcttctttgtccgatgaaaaggagaacttggcacaacattactcgaatttgattcaaacaacaaaaattgaaccattactaacatcatccgcggaaactacattctaaacatttccattagcacaaagaaaccttatttctatcatcagaatatgatttttcattgatataaacatctcatttgcagataaaaggatattggcatcgctatctaaaccaacacactccaacaacctctctggaattggagacaccttctcattggtactactaacattaataatatgatcactgctcaacaaagcaatataatcacaagagacattttgctccttaacatatccaccctcaccctctaactcaaaactggaaccaatttgcagattttcccacttcagtaaagcacccacttctaacttgaactcactatcatgagagaaagataaagttcctctaccaaacataacaaaagactccaataaacagactctttgagtgactccaacaacaacaacatcaggttgcttcaactcctcttgagcaacttgaagaaagacattgacaaaattcctccaaggattagcaacaatcatgacagggacaaaaattgaatacaaaacaccattaatctcaacacttagcttcaaataccaaccccatctattaaaaccagattgaattttccaccaaagatgaccacgtcgcgtcgtttagagtatttgaattcaatcaactttgagcaaccatttaggatatgggaaaccattcaattaacttgatcggataattagtccacctttttttattcttaaagaactcaccaattttttttttgaaaaaaccattgcttaactccattgaaaaaccttaccttggatttgaattctcatacttaaactccaaattgaccagcctctcaaaaatgtccacggaaataccacgtgaaatcccccaacagcaacccaaccactccaaagaaggggaattatgatagttacgccttgagaattttgatttaaattctaattggagaaaactaattgagagaggaattttggaaattgaaataagaaagagaaactagcttagggaagggagtgaaaaagatgaaacgaaaagcatcgggaagggatgttgaccctgcgtcagcgcacgcccgaagagagaagcgcggtcgtcaccgtctcaagggaagccggaaggtttagggttttgatagggagtctaaaaggaggagatgaagctgaaaagacacgggttcgttctcttatatggtcctaaatgtctaacatgttagtcactttactactatattgaaatgacggtaacatgtgagagtttaattgacatattagagatggaagaggaggataattgacatgaactataaatttaacgagttactcaacctattatcaattgattataacatgaaattctaccaatattgtacgtgatgaaatttcctccatcaagttatccgaatgggaggtctcataagtaggggtgaaagttcggtgtacggtttggattagggcctaatccaatccgatccgaacaaaatttggattttaattttccaatctgaatccaaaccaatttgagtttgaatccgatccaatccaatccgaattttcatactctaaattggatccgatccgaaaatccgatttttttaaaactctagtttctcgatgaaataaatcaagcacaacggtagcctagtagatttaggaaatgaggaattaagttttgttaggattctaggggaagggtggaagtgctacgcctactaagctatggactatgcttctttttagaaaaaaaaagttaagcacttaagcccaatcaagatacataatacaagacatattagtatttggttatattggatttttggatccaattaccctcaatccaatccgatccgaagatccaaattttccaaaaatcttaatccgaatccaatccgaacacatttcaaatccgaattactaattcggattggattggattggattttggattttatccgaataactttcacccctactcataagcttgttaccaattccaaaaagggaggccccatcaatttgaatacttgtagatgaaaaggatttgaatgtctttgtggagcacaattaataaaactatatgatcaacgtacatttatatgcgaactaattaattacacccttgtacaaagaatcttccgggaatacaagaataccacacataacccagtcatgcatgtttgtattttatacataagaacgtatgaatattaaagaaaataactagacagcaaatcagccaaaaattgcaacactacttaacattgttgctttaacactaaattttcgctacataaagctgcaaataaactgttgttgaagatcgatcatgatccatgagtccatgaccatcaactttcattaaacaaaaagtagcaatcaaggatccgtttgcattggtagggcgtaaaacgttttcagtgtaaaatgattttcatggaaaataatttacaatgaaaaacacaattccaaaattagttttccattgcttggttccatgtaagaaaaataatgaaagtgaaagaaatatgaaagggaaagtaaggaggtagtgagaggagtgtataagagcgacaagaaaaacagttttcccttcattttgaagggaaaatggttttctatcattgagagtgtaattttactccaagggaaaataattttacactcctttgccaaccaaacaatgtagaactgaaaatagaggaaaacaattttcaagaaaacgttttacgccctatcaaatggagcccaactttcaagttttcttatcaattgtgaagcggatttggacctcctgggatcgatctcctacgcgaaactgtatgcaatctatgctcattgttcatgaaattatcgcggttgcctctcgaaaaatgcaggagcaatactaatatgaatgtaaatgtgaaagtgtaaatcaatgaagttttttgttttatcatggaggcaatcaggaagaagctaggaaggagaatgttttggaaattaggaagattagtaaattaatgcatgcttttgtaggctgttatataagatttgttgcgttacgttgtcgtcaaattggactgaatgcattattagtacacgtagtaagttgttaatttaatgaaatacttatgtagaaccatatcataaggtacatgcatgaatgcatgattgatgctttcttggaggataaatgattgatctaagtttttcccatcaatcaaatgtttgactttaattcattaaagtactatatattatagacgaattagaattgagtttgcaattttgaatttgtcaacaacgattatgtacgagctaaatactaaccagcttttgtttcttactcgaatagtgcataatactagctagctatcttcgttttgattcgaattagagatagatcaacacgaactcatgaattaatgattacttacatttaaaagatggtattgtgtgagactcgtctgacaaaccattttcgtcggacgtcacacacagaaaacaactgacagaatttacacaacaactgaaagaatacaagaatcaactgaaaaaatacaataatcaactgaaaacattaaaaaatcaaagaaaaacaaaatccaccgaaaacaaatacactattaccaaataaacacaccaactgaaaacaaatacaccattaccaaaagaaaggtagtaatatgtaaataccaaataagctagaagctaaatactaaacaacttaaacacataaaaaatcacatgaatcattaaacaaaccaaataaacaaattaagcaattcaataacaatctgaaagaatttacacaccaactgaaaaaatacaagaatcaactgaaagaatacaataatcaacttaaaacatcaaaaaatcaaagaaaaacaaaatcaacaataccaaatgaaagatagaaatgtctaaatgaaagaaaaacaacatcaaatgaaagcaaaacatatgtgaatgatacaaaacaacaattaaaacacaccaaaaaaaatatgtaaatgaaacaaagacagcatcaactgaaacaaaaacataataaaatgaaagaaatacatatctaaatgaaacaacaaaacaaataaaatgaaaaacaacataaacactacgaaatgataaaacaacaataccacctgaaaaaacacttaattaaatgaaatcaatacagctactaatgacaacaacatccatcacaatcaaagcaaaaaaattaacaaagtaaacagacaaaaaaacaaatgaaaaaaagcccgcgcgcgttaagttgggctcagcccgtccgacggaacctattgaatcagacggtctgacccaatagtttcacaacatttaaattagattataccaaataactcatcatcaaaacataatttaaatttcaattaacataatgaaccatttgtttgccacctcccccagcaagcatatctattttgagaaacttgcacatattaagcttgtgatcattgtagtccttactagacataatttatcgcgcttactacgtaacatgtcatgtttttttttgaaaataagagtttcaaatgaccacaaatacatacatatagtgtaagataagaagaaatagagtttgggttacaataataaactttagcatagtaataagtcgattataagttttaatatatattctgaaaatttatgacttttgtaacatcggaaagtatttgaaaaatacttcaaaacaagattcatttataataaacttatccaaagaaagattcatttatagaagaaatatttacaatagtattgtattaaagtagcacatgagatcgcaacatttggcgtccttattaaatgtcatttctcgcgtttattaattgagtatcatgttattatttttaaaaataaataaagttttaaattactaaaaatacatatatatagtttgaaatgtgaaaaatagagtttctttacatatatattggggaccataagggtgatgttcaagtatttaataccatataaaaaggaacatgatgaagatgacatctcaagtccaaaacatgaaccggtgttccattttttttccaagtactttttgttaaaaattatgtcatgttcaagtccagaaaattccaaacaagtatttttctagtatatcctcgcttaaacactggtattagttggcataatccttattattatctgttcaaaagaagtttatactttaagacaaatcatgaagatgtcaaagtacatacgtgtcgttgtctggcagttgttatagaaaatattgtaaatatgggtggttacaagtcttatgtgcttggactttcgtatatgttacttcttattctatgaaaaaaaacatctaatcaagctttaaactccaattagaaatgaatcaagctaatcaggttacaatttaaatgccacctaaaggacaaaattgtgcattgagattatcttactattagattgagttattttctattgtgtgacacatagagtttgcttcctttccattttcaaatcattggaaagtcaattgatggttttgtctagatgtaagaagtttttttttttttttttgacaggtatgtaagaagttaattgtttaagatttttcaaatttaaacttcattttcatctaaagtggcacaaatgtatactagtatatgtttcacaataatctattattattttagagatataattctctttgatgaatattattttgtatatactatacattatattttctattacctagtgttttttgatatcgaccgtggtcctttattatcataaatttactagggaactcaaatcaatctatttaaattgcaagtttgaggtcatgtgagcaatgctcaaacacataaaaattagagtctattttaatctttgatagatgctaatagaggtggtcattggatacacaaaacaaaacccaatcttgaactaaccttcaagaaaatcggagaggaccggaccgtcagatgattgggcctgaaccagaaccagaccgaaaccgcacaaacataagggttctcgtggcccaattgatggcggaagaaatcggcccgactctagccccgaaacagaccgtgaaccgcactcaacgcgaaacgcatcgtaaaccgtcctcaaccttgaatcgaaccgttaaaccagttctaaatatgcataaaagttcttcaactcggcctacttattaataacactagcgtacatggaaggtatcgaaaattacttattgtaaatactagtgcatgtgcaattaaaatttaaaaatcaaaatacttttccatttacaaaaatatattggaccagtgaaccaaatctgaaccggaccgagccctgaactggttcaggtttgagaagatccaaccctgaaaggaattttaggcgcaatcaatcaataaaagaagaaaataaagtgctaggtgctgcgtcttgccttatgtgcgtaagaccgaaactcaaaggaattgacgggcctgcacaaggatggaaacctgaactggaccggatcgatcagctaattggcccggattcaacccagcccgacccgtgtccatgtttagatgctaatagtaccatatatacaactttgttaaggtattagtactagaattatcattggaattgataaagaatatatgtgaataaacctacaaggagaaaagttaatatattctctattaggaacattttctagtactaaagaataccaaattttggttctttattgtatacataggtgctactacaagatttttggtattatgaatctttcatatgtattttgaatcttgtaatagtactataagatctttcaattggtactctaactattggtgattaggcctttctcaagatgatctatcctagccatcagtagttcattacaactctttgttgaatcctatggctaaaatactttgctctcatatctgattcactcatactttaaccattatattggttcagagatctctacagtaaacaactctcaggtcaataattgaagttgtataaagatgcatagaacgaactgtctcatatacagaacaaaaactgataaaaatagataacatatgtcagaatgtgaacatatattaaacaacccagaaagagcaaaacattgacttgtatttgtatactctatcaacatacatactgtaacatcaagacaaaaactggtaaattttctataaaaacttagcaaattgatgaaaacccaatcaattatgaagtgggttaggcccagttggagtagaattatgtgtgacagcatgaagtgtttttacctcagtttcatttacttcctttgagctaccaaactttacatagttttgagtctgatcagacgattgaagcagaaattttcttgcagatcttctttcgatttgataggaagttcgctgatcgaaaaagagcgaaaacaagatcaatgaactgccaagaatcactaaaacaacccaaagttttgtactaaaagaacaactttgagttgacatgttgaagtaccaaaaactttggttaaaaacacaggaatttggcttataactttataagtattatgtttattctctgtgttagaattttggtaggagattaataaaccaaaacatcaatggtaaatactataggtctaaaggtatgtcatttagtgtaagaaagagacagccgcaggtctcattctcataattcatatgcatatggtcccatgtattgattgaagagtctgacaaattgtcaaagatgataaattgggttgattaagtgattatccataaaacaattagaaaaggatttgagtttaagcttggaattattagagacttagagttttaagctattgggatttctgggaatcaatgggtgatgaagttgtcaaattgctgatttttgatttgaaaattcaaagtttacagatagaattttttgttagaagggagcttttaaaacatttaggttgtgaggagagagcccaaaataataattgtgaaccactacctaataagtaataatatcatatacttcctccgctccacaaataatacaacacgtgagttttcaaggtcttcgatgcacaacttgaaccataaatattaaaatatatttaattatgtattaacaaaaaaaattcaaaaaaaatacacattgacatgaattcaacaagatttcacatgactatgatattataaatatagtggtggaaagtcgtggtaaaaaaattaatgacatatttaaaaaaaagtaagaagaaattctcttaaatgcccttgtacgcgcatatatccagaggctcgttacaagttagacaccccgcaatccccttcttctcttaaatcccgagtaaatacttaggtaggatttaaactctagactttattagagaagatggaaaagtttagcacttgagccaattccaatttttaggtgaagacattgtttgatagcaatttgctattcaacccaattgcaaatccttcaagattgagtaacctaagtaccactaaaaaactaagacaacactagaaaacatttttgcagagattagaggggctgtgcgtgagaaatcatgcaggtcttgttatctttcatagtgcctatcttcaaagtgatggaaccctacagagaaattgaataagatttttttgttgcattataagagcaaaacaaaggaaaaaaaagattggtgtgacgatgccttaactcgcacgaattgtccttttgtccacaaataaatggcgggtatactattttactcgtagtaagtcctacgtaacactatcttataataacattatgataataccatattacgttgtttcctaaaaaagattactttataagtataaagggtcactctataagaaaaaaagagttattatatacgattttttcatgatatacctacgacaattttttttattaactatataacccgacttttcaaaattcaatatataccttttagttagtaaaaatacatacatataatgccttttatgactaacagtggttaacactcgccttgacaaagccaaatcgtccaattgcatagaaagaagatcagatgtgacgagaactcatccaatgcggttttgttttctcagttagacaatatgtcgttctcagcagtagttaattaatcatacccttgaatattgttacataattaagttaaatacttttgaagaaaggtcaccagagttttgagtgtccataaaagagggacaatcagaaaagctatgataatcagggaaaagtggtcatcaggaaaagtatggatgccacgagagatcattaatgagtgtcatgggagacgattgtccccaacataaagtggcataacaaaatttgagtgtcatgggagacgattgtcccccaagagaaggtgaccgccatatatcataagggaacgtgtacgaccaacataatagaaatactgcaagatccgtctttcactttgatttatcatgtttcatgaattttaagtatatttcataataaaatttgggttgggagtggtgcgagctcgactagttggtttccacctgtcgtgggttgtttgaatgttaattttgatgcacatgtgagtggtaatggggaggttggtatgggtgttgttatgcggaatagtgatggcaaagtggtgttcttagctactaatcgtgtcgcggcaaaatgtgatgaggtgatgttggctgaagctatggttgttagatatgttgtggaggtgtgtgctcgattcggttatgataatttggtttttgaaggtgacgcaagcacgattgtcaatacaatgaagaacaaagttgttggtgtggcccctatttttcgagtctatgatgatatttctagtgtagctgggaactttgcttgtttttctttttctcatgttaaacgagcgggtaatgttgttgcccacctgttagctcgtgtggagtgtcctagtaacatggagattgtatggtttggtttctttcccctaagtatcactactttggtggacattgatttaatataagttccctagcttttccactaaaaataacatctacaaccgaactgacttagtttatttttattaaagacttgatttcattttatttcaataatttgaaggagtaattaagttttatgataaccttaaatataaactttaaacaatttttttttgataagtaaactttaagcaatttaattagcttattaatgttaatcaagtttaacttttaaggatattacaaaaagattcacatttagtcattaattcctattaaccattaaacagtactattaagcattaaccttttaataaacttatctctattatataaagaaaggggggcaatggtgtcctcttttgaaatgcctattttgccccccttccctttctaaattataaaaggaatgtcaaaatcaaaatcgacactcaaagaaaactaccgaaaattaatttacaacactcactcacaaatcacttaaaagaagaaactttacaaatcactcatacaattgacaaaatcacgtaataaaaatcacgcaagttactcaaataatcaggaaactttattaaaacttaaaattaatatacaaactaaaactaataacctagaacgtcaatgcatacaaaaacatttacaaaaatttacttacaaatcagtactgtacttaattaaaaaatcaactaaaatattataatattaaaaatcataaataaattcaataaaatttctattatgtttatagaatttaactttgaaaagtaaaaataaaaacaaaaagaatggtgagagactgaagtgacataaactaaaccaattaaattttgcaactaaaaacaattatacttcgcatgtttaatgttcaaattttgacttttatgccgaagaaaatcgagtttttgtttcgaaaaaaattcaagcacgcatcgcgtgcaaaaaattctagtttgatatgttatgtcactggagttgttgccctaccgccattgatgctactaagcataaagaagatttgcaaataccgacattttgtgtatatttttaaaaattgaaggatatatggtgaatattgagaagttggagggtatatgatgaaaaaaattatcggagatatatggtgaaaaaaccacttaatataaacggatcactttatatcttaaattgaacacctttatcttaagactaattctactataattgaatccttttagggaataagttatcatcatctcaccataaataattagtaaaccggtcttatactactatgagctaagaatcaaaatctaaatttctttacttctatgtagaggtggcatggatcgcgctagcacgcgggtcggcacggtgtgggcctgggccggccttagcccgctcaaggttcgaccaggcccgccgcccactatatgggtcgtggacctaccacggtcaagaaattttatttttggcccatcccatcattagcccgcctatatggcccgtgggccggcccacggactgaatgtcccttttctttgttttttagtctaaattccaaaaaaaaaaaacataaagtgcaggtcaggcacggaccgggccgtggacaaaatctgaaaatttcaggcttggcacgacccgacattcatggactcgagcccaacccgttggtgccaaagcccacaggccaagccgtgaaaaggcctgacccgtatccaggtttacttctacgttatctatgaaaaagttaatagtgatcttagagcttgtttcgttaacattcaaatgcatgagaaattaaaatttctaggaagtaaatatatgtgttgtttgattggtaaaaacatgggaaacagaactctctaggaagttctatttcctaaaaaatggaggaaatacttatttaggtccgcctaagtaagtgaaaattctcatgggaaataaaatttcccatgttcaacgaaacaaaaaaaatgtacttcatagaaaaaaaaaattcatatgcaatacaaattcataaaaagttatacttcccaatttcaaccaaacaatcccatttaaagatggggggtgttaaacaaatccctaaaccataaacatactccaagcattgtcagggttttgacaagcaggacctttgttttttcctgacagaaaacgtttaatttcagtggatgatatgatgagacagaatactcattttttcctctgacagaaaacattttatggcccaagatgaatcacaaatgacaaaaacgaaagaggttacggacttacggggctaacccaactttggcgacttgtacgaaagttgccttcaattataaatgacaactcacgcagctaataaagtctttgggggccaaaccccaaattatgataacggcataatcaggcaaacacaaacttaattgactagttgaaaaatagccccgaacaaaagattatctcggacctacaccgcctttcctaggatcctttttttttctttgcaaagcatcactagcacacgaattgcaaaaatctttttacatgatttttgtggctctctcttttagatttaatttgtacttgtcttaccgccaaaccgtccgatccaacgactttgtcaaagtcatatggttaatacatgcaggctaggccgggttagacgaagccacaaccaaccagcaaggtgaccaagctacctaggcagaaaagtgaccagaaattgggaaagttggctgaaaacagacctattgtgacactgccctttcaattcagtcatcaaatagatagcatatcagccatagcatatgatgaagaggaaatgacgaatgagataatttcagctgtattcccaatcataattattcaatggagtccacacgagcatatgttcatttacaataacacttgaagtaaataagttcttgtgtgaaggacccaatcatgacagcattccacacagtattaacaccattcctaaaatgcaccccgtcccatggctttatgctccattaaaaactggattttcaaaaactcggtacatggctaaagacgtacatttactcctcttttttctctgcatcagtaagagatgtttctgcagtctctgctattggcttctctaaggggctgtcttctggcttttctgatggtgggtgttcttcctgctttggagcctctctgtcagtagcttcaacagtttcgttaggagaggactcaccagttgccggaacatccttcgtcttaagagttccaaccttcacatatttactcatgaacttgtattcccaatcctgtaatgcctcgagctcgaaaggaccaaggccagagatatcccccgtcaaatcgttatcttcgaaggacatctttgctagagctctgctggcatccttgccagcaaacaatgcatagggtccacctggaccatagaacatcctgaaacatacatggcagtggttccaaatgttagcaaacttttgagttggttccataagtttctggaactacacaaacattgatagttgcataacatgttgtatgaaataggaagctagtattcgataagtataaaatagcaggtctcacaggtgaatcacaatgaagtcaggctaaagttacctagagaacatgaaggtatctgtccagtaaagctcaattggaataacttgaaaaaacattcaaaaacagtcaccagcaaattgtttataaaaccacaaacagctagacaaaacaagcaaattccaaaagcaaagcagcaggaagatctaaaagtagcactatgtcgtgcaatttgtgattgattaaggtgtacaatcatagaattggtaaactctgatacatgagatacaagaaaatcatgtcttccttcaaaggtcaggcatccaaaatatataagttcagttcagaaacaaaatgacgcatggaaatgaaagctccctttctgcatttaggaaaattgcatcagcctaccttcagctggaggagaggggttaatattctcggcctagaatacaaatgactatcacgaagctgaacaaacttcaaacttcccatacaccaatatttgtccaatgataagtacacaaggcaacagagccctcatgaccactctaacttgcaaaatcacttccagtaacaatcaaaccggttaaggacacaacatagatccaaattgcaactaacgtgattgcaatatgatgtttataagttcagcgaacgcaaatattataatggaacatgaaacaacattggtgccagtgatgggacaggggaggttaaaactatacagcttactcctgccaggcaaagaaagaagactatattaggatcacagcaaagatcacaataggagaaactgcatatgcaacagcatgatccagcactacaacacccccttgccctccaaatttcattccttgaaacaatattcagactattattatcttatccagacaatttaagaaagcatatcatataacgttgtctttgttgcagctctagaagaaacatattactcaactcagtgcacttgtgttgtcatgggtaagtgttcaagtgtttgagtcacctattctactaagatatttcatgattttgacccataaatgaattgtcaaagtgtagatatccatgtcggaatattgaggatccaacacgggtacctaaggcaaaatgaaggatccgagtgatgtaacatatatgagagtttagagcgataaaacttcgcagaacataaaaatccaacgacatatagcatatcaatcagaagccaaaaacatcatagcatgataaaacacttttcaatggcgtgaatgttccgcggcaggatcaaacactatttctttctttccctcttgctactggaataatgttcaaatgttattctgattcccaattcttttatacaaccatgtgatagtgatacatcaacaacagcaaaaataataatagtaataataagtatatcaacaatagaaatcagataaaggctaagaaaaacacaaggaaaagcacactttacaaaaagtcatgttacactccccagtcctcagatggagaacccctaattatccctttacccaaaatccaaaaaggtgcagctttacaccatttaagcacaaattaactccataaactgattcaaccaatacaaagcaacacaatttacacacacctaaaccctaactcatcccaattagcatcaaaaggtaatccacccccaaaaaatttcaatgaacccaacaaattttcaaagctcaaaactttaattagtcataagatcatcttcaatcaaaccctaaaatcttccaacagtaaaatttgacccaacacagtaaaaataaaaacccagaaaataaaaataaaatccaaaagaaaagacataaaattgaacaaaacctgctctgagaaacatcatagatctgacccttgatagccataagcaagggtttcttggaatcagagccatcatagtttttcaattcatcttcagtgatctcacccaattgaactggaggaggcaacggctcaatttcttccatagacctaggatgttgatgattctgagaaggagatgatccaaacaacccagaaaccatatggtagaaagctaaacttagagcaattacagtgaagaaagttgcaggagaaagacctgtatatgctgttatggcttccttcaatgtttcccatagttctaaagccattgtttttttgatgaaatttctcttgttgagaatgaaagggtctttgaaagctctgtgtttctagttcagcaattcaacttatggaagtgatgagagagagagagataaatatcgggagttggtaggagtgatgaatgttgaattgttgatgtattggggagaaaaaaagtagatacatttttggtacttgggcttgatttcgcagtattctatgttctttttgtgcagaaagtgctactagcctataactagtatgaatttctttttcttgattttgtgtccctagtagcccgtctttgacttgcaccctagcccaacaagattgagagttttcttttacaagtacaccaactcaatggtttgagatggcaataaagcttgttacttttgacttcattttagtccagttcaattcattttagttttggacgtattatgttcacatctttttatgtttttatttgaaaaaatgagtaacctctaataagtttagatcagtaaaaataagtaagttttaataagttcaaattagtaaaaataaaatataacactttataaaataagtttatataaggaacataaggtctaaagtttaataaagttcaaataaacaaaaaaaattctctaaaaattccagttcaatttatttcagttgaattcaattcagtccaacaaaaaatggcttaaagcatgatggtctaaaacatggtacgaccttgcataattttggaatgcatggctctgataccatgtcaaaggaccaactcatccaaaagcttaaagggttcttgcgtgacaaaaaggttacgggttcgaatctcatccacccctcctttctcagtggaatatttaacgccaggtatgagggaggcatgtgctccatccacacttcaagaccaaagggctcttgcgtgagggggcgtgatagagtatagatctattcctgaggcctcaaccataagtttaagcttttggctgagttggtcctctgacatggtatcagagccagcgtgacaaaaaaaaggtacgggttcgaatctcatctacccctcctttctcagtggaatatttaacgccaggtatgagggaggtatgtgctgcatccacactttaagcccaaagggctcttgcgtgagggggcatgatagagtatagatctattcctggggtctcaaccataagcttaagcttttggttgagttgatcctctgtgaggccccaggaatagatctatactctatcagaagccttaaaaggcacttggtttgatcaatcttaaaatgtagactaatgcttaaagctggtcttctagcacgtaacatgttgtggtagaattaatatcatttgatgtaaatacaaaagtatgtaattaaaaatatatttaattattattgtttattacttaacgtgtacatgaaatatatgtatatattatatatatacttcatttaacttttatcggttgtaatgttttgacttttataatatatatgtttattaactttgtctgggaaggtctggctcatatagtacaaaaattttgttttcaaaaataattttaattgaagttttctttttttcttcttctaataatgaattaaaaatgaatagtgtcaaagttaaagtatagccgttatttaaaaatgaggacattattaaaaagattattgaacttatctcaatgtatatttacaatatacaaacctttcaataatacactattaggtgatcaaaactcttaaaagtcaaagttgttaaaatattagaattttagtataaactaaaacaaaagccattaaagttttcttttacatgtgaaacttccctcctaaatttgtccttttgaaatctctcatgaatgaatcaaccattaataaatgagtacataaaaaatgtaaataagggggtttaataagttgcttttttaattattattttggtcttggtgattccccgaattagttataattatcaaacactagtcttatgtgcacgttgtatgttcgtagaatgtaactgatgttatgcatattttctagggatcgatagatcttttttcccaatcggaggactatagtttgtattttttttttagtaggaggtatattagtaaaaaaggtggacatcaaaattctcaatagttctcatatataatagagatattattatttataaattctttttgattgattttattagctttttgtaattgtctgtcttgtgataaattaaaaaatggacatctatactaatatattaaaaggcgtgcataacaacatcgatgcgccacgtggcaccctcctcctgccaccagaatttcgccacgtgtctattaaccaacaaagtcaagtggtcattattttaaaaataaatatgctgaaacttgggctcgaacccctgaccttatgtaagagttttcaaagaatcaccatctcatctaacttctcttagtgatccatgtttccacagttgatgttattaaacatatcccttgtatgcttaaaaataaataaatttgcatgttcattaaaattaattatgtatgcatgataccatttgaacagcagtgttgaccactacagtactacccctagggagttttagttcatgtaatctatgtacaataaaaaaatttagaaattgtgtagtatagggtttgatcccgagacctcaagtacatatactaaagtcttaaccactaggctaagttgtgtttattattattatcataaagtattatattaataaatgaatttttttttttacctggggcatagcccgggcctaattactagttatgacatgataagttgtctagggaattggagataaaaaaaagtaacaattttaacagaattggggtaaggagaatgttattacctaatagcttaagtattagagatcaaaaaacttgtctctgtctttatacttacatgtaattgtaaaacttaattttgttttactttcaaatattaaacattgaaattgcattggattggatttatggttaaactcatttcattttaaaggtcatgtgtttgattactagtagctacacattgtttatatttttgttgaaatcataaacatatgtattagaagctacgtacacattttaaaggtcatgtgtttgattactagtagctacacattgtttatatttttgttgaagtcataaacatatgtattagaagcttgataatagtgtcacgtagcaccgtttctttaatgggaacgcctttttatatatttgtatggatataaatagaagtttccatttttctatcaatgcattaaaatggcgatgatggctcgagaattatctagtaaaaaaaaactcaaatagacttgatccacatcaattttagtggacctaatgtgataccacatgtaattattggtggaaaatagtgtctatgaaaaagagcactaacttagaaaataacaaatataaaataggagtaattgtgggttgtgtagaatgactatgtaaaaatatgttactactttaaaatgggtaaattatacgttaatataaaaaaatgatcattgtattataaaatagcatgtattaaggtgagtaattataaattgaaaatggtcattataggaaaaacagaggataactatacttgaaaggctggacaagatttctagtctacactaatattaaaatgggcaaaattcacgcaagtcgttagtactatccaccatgataaacaatttgctagaatctcaagtccaaaattcagatagcatgccctcctcatttgaaagaaactaaactaaacttcgtcttactcatgctgaccttcttttcgctcttaccatagaaggagggtgtttcggtatcgaaaacggtgtcggacgccttgagatgtgtccgacaagagatggatgtccgtgagggatctgcaacaatgacaaacgtgagctaccctcgggggtgtttcgaggaaaccccctccgacgctcaagtcagctaaatgcttaagagaattctagagagagagagagcttagagagagagagataggctatttttagtatgagagaatgtacctgcaggaatagtactggatggctatttataggcgtactattcacctgacatggcgtgtaatcttatgacacttgtactgttgtgattaatctgtcagagggaagattcccgttgctttgtcgtttcctgtgaccgcgacggcagtctcggcccaaaggttgaaaatgaggtctccccttttgtaagcccacgtcatcttggtttgctcccggccatcagttactgtccgctagcaaacttgggtaacacccatacagaggggatgttggtgagttattctcttcaactttgcggccgcctaagatgcagtaaggcactacctgttgtgccagcatgtagatagccactctcttctcaagggaccgtacgtgatacttttgcttcttgatagccaacctttcctcgaaaagcatctcctagttggttcgataagatcatggaagatcaattatttactttacatcataagagttataatcacagcgcaacaaacaaacaaaaaaaaaattccctaatccctacttactattttgtaatctatactaatatattaaaagacgttcctaaacaaggaattgtgccacgtgacactatattgtatagctcattcccatgacatcaagtcagtatattaagtcttaaccactaaaccaaataatgtttggtgttataattttaaggtaaaatattaataaatgaaacataattacttgggacataactgtaatctccataattttatgaatttcataaatatattctaatgtatatttatatatattttagtattgaaataatttatttcttcgaatgttgattgtttaaagtcaaaatgattatttaatgattttaagtaattaaatattttatttagtcatactttgaaaaaagttactttataattaaactagtggagatgaagtaaaatgattttaatattgggttagaagagcccaaaccatatagtttttcccatgaacattatcattaaactaacccaccaaagcccaactcattatcggacctctaatggaggaacctataaatatcctttattacacaattttccacacattaaacacattttattttctctctctttctcccccaaaattacggccctctctcttctttttcttctttctctcttttctccttcctccacccggttttcttctctctctctcggaccacgccgtcgtcgctgccagccattcctcctccctcttctcggtagtcgtgcctttttttccctctctcattggttatttcttccttttcaagttttatttaatgcaaagtttatatttttaagaattcttttaatatttttatgattataagtcatagtttgatgatttaaatataaacgtaatttatataataaaataatttaatttcagatttatttattatgtctaaattaaaattttaagtatcaaagcatgtatttttagggttttatgagttggaacttaaaatcatagtagtatattatagtttatgaaattgagtattcttataattttaattatgtttaaatatgtttcaaaagggttttattatattataaattgctggaaattttatacgtatgtttatgatggagtctttatgatcaaagtatgagtttttaaggatttttttaacaactaatctagtagtactatactatgaggctttaataattaagttttaagtatggaaaatgttttaaaacacttttcaagaggggttaaagttttttaatattgctggaaatttttagagtattgatttgtggttattttgcttatcattaggccgagaattctctttaggcgacttttaagcttgttaaagtggtctcgaactttgtctatacaaagtaagggtgcgttctattgaacttattggccctaaacttattagaccttatctgaactgaacttattgaacctgaactgaacttattggaacttattaaacctgattggacctgattcaacttattggacctgattgaacctgattggaacttattggaccttattgaccttattgaaacttattagaccttattggccgtaattgaaacttattagaccttattggacctgattgaaacttattagaccttgttggacctgattgaaacttatttgactttattagacaaaaacattaatcatgaataacataaatattaccaataacgtaaatactacccctcaaaattttttatggagtaataattattataattcgtcctttaaaaaataatgattattaattatctcttatgataattaatttaacaaaaagatttactatttatatatttgcctatacataactttcaccactaatatatctaatagtcttgttttgattttataaaacactagtagaaaatcaaaagttttgtgaccttattatgtttattgaacattgactatttggacgttattggaccttattagacctgattggaacttactggaccttattagacctgattggatcttattgcacctgattggaacttattggaccttattagacctgattggaacttattgcacctgattggaacttattggaccttataagaccttattggaacttattgcccttattagaccttattgcaacttatctgaacttattggacctgaaacttaattttttaagttgaacagaacgcaccctaagtacatacctatgtgttggttgaattagtatcatgttctgaggatgagattatttagtatcatgtataggttgatatttatagttcatatgtgatttatattcaattgcatttgcaagttttatgcgttgtttgaagcatgttgattatgatgattatattatatttgtatggatgattgatgcaaatatatgggatttgagaactttgttttattaattcacatgaggcattaataattatgttggtattgtatcatggattggatcatgttgttccctactgatggtcttatttggtaagttggttattcacctatgaaaggttggtttgttgttgacttggttcaacaaataaaataaaggttatggatttaatattggaattaatctttggttgttaagttgatgatcaccctatctaatcataagataaaattggaagtttgtgtatctttgataattatattacttgtcctacttgtgagtcataacaagtagaggtggttattggacagggtagtctaatggttaaagggttagggtcaattttatagggcttttattggacagggcttttattggacagggccattatagggtcaacaaagaaacccaataattttaaaaaataaaataagttttgtaaaaataattagatattcggattcgcattcatttatacttacttttggctctttttgttccttgtttttcttgctcgtttaccaacccgtccattatcggcccgctataagccctctacccatttggcccgacccgctaccgaccctttatgagtcgaccctcttttgacccgacccgcttccgactcgcactgaccctgacccgacccgtccaataatcaggtctaataacaagtaaataaattattaatcacgtaagcgaaaagtgaataacaagagctttagacttgttgaacgtctgaaaagttggactagtatgagttggagtacatagtagtagcccatgacttttcttgggatcagattgatcactgtgtcctatttctattgaaaagattcctcaatatcgtaggtcaggggagtatggagtcgcgtccgtagttcgtcttatagattgaagaatggtttggtttggacaactttttcaccaggtacccatgaggtttcacaatattcacctggtaccctcgcgttttcaacaattcacctggtgtccctgaggttttgaaaaatacttagaatacccttaatgactaacggttgtcaacttcgttagtcattaaggttaaatcagtcaaattaacctctaactaacctaattgacactaattaatcttaattagctctaattaaacttaattaatacttaaaaaacctaattaacctatctctctccctaacccctaaccccaccacctgaccccaccttacccgaaccacccaaaaccaccaccgaccctaaccacccaaaccccaccacccttaaccctcccaccacccctgaccctccccgccgcagcccctccctcacttccacccctcgcggaacgccttcccccacccccacccctcgcacagcggttctcccacctcccatcgaattccgcggtcccctccccccacctcccgtcgagtttcacgctcccctctaattcccatttcattcccttgttgctgcaacaccccctctcttctgacctccaactatggtaaaatcgatggctttctctctctcctcttcttcttctcctcaactcagccctaaaatttcacaaaaataccgcttaactcagccccaatgtcctatgcttcaaactgacatcggtggggttgggggaatctttgcgctcctccccacctagtcgatttttcgcgcagccatccacctgaattcgacaatagtaaccctgagtcaggggaaatcgcaaggaaattgactcagggggtggggtgggggaatcgttgcgtgagggcttgggttggggaggggctgcggtggggagggacaggggtggtgggagggttagggttagggttagagattaaggttaactaagttttttagggttatatttgacagaaagttaacggtagggtcacgtcaggtatttttccaaatcaccagggtacttggtgaattttggaaaacgcgagggtaccaggtgaatattaagaaacctcaggggtacatggtgaaaaacccgattaattactcagtaaaagtagtctgctatgttattatattattatttatccctgttaatgtttattagtatcatgtcagatttcatatattttttactatgtagtactcagctttactgattacgtgctttctgtgtatgtgttgatcatgtctatgccttattgatcctatgatgacccaattggttagcaatctctcaggagcaatagagcatcgtcgttcacacgtttgaagatgatgcatcattggttcgataatttggagagcttgcgttgattttacatttattagttgactttaattttgaattatgttggtttgacttttagagttgactaagtgttattttcaaagttattttttttattatttacgctgcaaaattctgaataagccgatacatacattatcatacgggcgataatagtttgatgattctttaagttttatatttaaaaaatattttgaaaaatatatcgatgtgttaaaatagccaaacctaaaaactagtctatacaaacatattaaaaggcgtgcgaaagaaagtctatgtgccgcgtgagtcgcgacgctctccctagggagttttaattcatataatccatgtacaataattttttttagaaattgcgtagtatagaatttgatcccgagacctcaagtacatgtactaaagtcttaaccactagactaagttgtatctagtgttattatcataaagtgttatattaataaatgaaattttttcttacccgggggaatagcccgagcctaataactgtttaagtttaaatgatgttgagcaaatccattgggcccatattaaattcttcaggtttagaatgtatgcttttattcaatgtcaaaaaaaaaagaaatccattggtccccaaaacttggattcttcggccttattagaccttaaaaattaggatttttggttaaaacacccttatgtttggtgatttttaaaacaatcccccttttgttttgtttttttgaaatgaacccccaaacggtttataaaatttttggttgcaaccccaaaatctaacttccgtcaaatccagacgtttgtgggcccacctatgctattatataataaccacttcatccccaaatcaggatattccttgtctcacaacggtcattttccgacgccctcaaattgaagttgctaatccaaaattttgaacgaaaaattgcaattccactctcaattgacaatttctgacatccttcaaatcaaataagtgttacattcatttctaggcattaaattttggataattttgcgattatagggtttatttgcttattttaatttgggttaatttttcaattagggttaatttgggttaatttgagaggcatttctatgcctgcaaattctcagatgttcatactggaagagaaggggtgtggattctttggatgggttgacaagaatcaagaggagtggcagaaggtagtcattaatgaactggtgctgaagaagaggttgttgacacatgaagtaacgtttttgaagagtgaaatcgcaaagattcaagacactaagccaaaggtggaaaatttggtggtgttgaccaaaaaatcaggagcatcaaaaaggcaaagtgcaccaaaaaattgtggatttatcgctggatttcacccaaaacacagtgaattacctattttgggcaccatgctcttgttttaccgtccataaaagtttccccttttctgtcattacagaattctccatgatgacaagagagagatagagagctggatgagagagactgaaagagaagatgaaaaggtgtagatgatgacaagagagagatgttgaatttctgactgaagcaagtgagagagatgaaatcagaaacgaaggaattgaattgaatgagaggttagttgaagggttttattacccaaggataaaaatgtcatttcacgcaacatttaggagggaaaatggaaaaaagggccccacaaacgtctgaatttgacggaaagttaggttttggggggtgcaaccaaattttttataaaacgtttgggggttcatttcaaaaaaaaaaaaccaaaaggggaattgttttaaaaatcaccaaacataagggtgttttaaccaaaaaaaatcctaaaaattaaaataaaccttataaggaactaaggaagtcaacaaaaagactcacacgctgacccactctccgaaaccgcgtcaaatttaataccgttgtaaaccgcctcatcataaccgacatacttaccgctattataaataatctcctccctcctcctcctcagtcctcactgttttttatgccctaattttataggtacgccttctttctgtcgtaattaatttcatctcgatttctgaatttccgatttgcgttcttgcatcgctccttcaatttacgttttcgattgatggttatattttattctcgcatgatttgtgattggaaaatcggcaagttttctcaagtagtttcaagtgaattttgtttttcatggtttgaaattctgcggatttctcttcgatttgctgatgatcaagtttctttttcctctttatgaaattctgcggatttctcttcgatttgctgatgatcaagttttttttcctctttttggagagtttggcgtatgttcgtaattcgttttatgatgttgcagtaatttgataatgtcatcgatttatcttttgttctacgcgattctggaaaatcataaattcgattaagaatggtagttgtttttgtttgccacgggaaatcattataacacaatatgactcttggatagtaataaatcattatttggatgattgtggtcgataatggtgatttgttactatttgatactcatatcgtgttacggtgtaggttgttatttttctattagcgttcgtatttattaaactaagctgttttgggttgtgcagtgttggatatatatttactgttgcagattgattttgatctgggtatcatatcttgttaacgagggtttagttctgctacttttgcatagtccatgtttcatgtctgctaatttttctcaaaggtagttaatgttttggaattagtgattgatgtttatatgtggtattggttctgacttctgaatagctatgagcactttggcagttgattcttattgctggagttctaccctaccaataaggatatatcttttcccttgatttgttgcatcgtttttgttttttctaataatctagaatcactcgtcgctctcttttaacttcctgtagtacgtgtcctgtcatcctattgtattgatgatatttttgttccatttggtttgtgtatggtgagcaagagcattggggacttggatctgctggactatttatgtaagatttcttggatcatttgaatcacaattacttgctttcttgtatgcccaatattgatgtccattatgttctccttgtcttgctggattgaagtttcgtagtaagaaatgtacgtccgtcgcatggcacctattgtcacttgaagggagttcttacctctatgcgagattgagtttctctttttgtttcagtttcctcgatcaggtttaattgtttggtgtgcttgtagtttctcatatgttttggtcaatgatggccttggtgctgtcacagaaccatgacttggtcttgaagcatattatagaggtggacttgaagtgttaacaatcgactatgctcttgcagcatataattggtagttgaagtgatgtgtggtacaagctgtaaatgtttctctcaccgcctgcgttcatgtttcaaggactgttgtgtgagttgtgacttggattatttttaatgagctgatcatttattatttagattacttgttgggatttcttgtcttgcatagcttatgatatttgtccatttgatagtgggtcaagttgatcttatgattacagatcttttgcttagatttcacttggcatatttagtggtcttgactcttgagttgatactacgtgtgggatcttactgcttttaattttacaggtctaagacttgtgatttaaaggttttttttaatcctgttactgtttgccctggccaaatatacttgctcaccttgactcttgagttgatactacgtgtgggatcttaccgcttttgattttacaggtctaagagttgtgatttaaaggtttttttttttttgatcctgttactgtttgccctggccaaatatacttgctcacctctagatgtatggattcatcctttgacttcaggtatgataggaaatctgtaagtaaatcattttttttggggcttgtattggacaagatgtatggattcatcctttgacttcaggtatgataggaaatctgtaagtaattcattttttttggggtttgtattggacaaagctggatgtctcaaaattttgaatcttggacttgattcatccttttgcgaaatgttatggagtcatactcatgctgtgggacgcatagttggtatgtgtactattgtctactaatttttcttttagtgttgaacatctagggtgtgagatgttttatatatgggtttggactgcttatcagcagtatgcactttctttctcacctacagaattcaggtgttggactttgcaacatggaatttacatgcaagctggaaatgagaatattcgtatcggtactgtcctaggctgacagatgtggactctgctatacttggcaatctggcacgacgggtattgattcttgagctttacgaatttgctcggtcttagtgttgatgtatcatttttagttgaggagatatggggtacatttttttggaacacgtgctcggaatcttattcttgtgttccttctggaaatggttgtcaactactaaattatatgattccagattgtaggcttcttgattttactcggcagggaattcttttttcttatgtcgaggtgcatgcttccttgattttcgtgaaaattctaattgttcgaagactatattggggtggtttttggcccgtgctttcgcagtgtgtgctttttgttggacttacgtcctctttatcttgcgaaaaagaacataattgctccagcatttatatttatgcagcttatggatgtatatatatatatctctgacatcgtgatagtgtgggtgggcaaatgatttttttttttttcattttatttgccttttgctttccataattttgtcatatgctttaaattctgttgttggcttataccagcaatttttcagggttcatgtgtccgtctaagtgcattttaaggtcttcagattttttttatctgtcagactcatatttttctgttaaagatcgatgttgatttggtagagaattttgttgactagtcttcagttatgctactttttgcacagtcaacgctttcatgtctgctaatttgtctccaaggtagtctaatgttccggaattcttgtttgatgtttatatgtggtcttggttctgaatagttatgaacactttggcagttgattcttaatgctgaagcctgaaggagtggctggccttctaccctaccaatcaggatatttcttctcccttctgttgttctagtaatctagaatcatttgtcgctgtctcttttaatttcctatagtacgcgtcatgtcatcctattgtattgatattattatgtgttctgtttggtttgtgtatggcgagtccagatggtagaaatgagaaagtagaaagagggtcggggtcttggatctgctggactatttatgtaagatttctatggtttttaattttaatggacttaggaagttagtgtagttaaatactattgattatttcggtcacaattacaggcttgatttcttgtatgcacaatattgatttccattatgatattctcgtcttgctggatggaagtttcatagtaagaaatgtacgtctgtctcatggtactcccttgtcacttgaagggaggttacccttctacgtgagattgagtttctctatttgtttcagtttcctgcaagaccaggtttaattgtttgatccgcatgtagtttctcatattttttggtcaatgacggcctggtgctgtcagtgtcgtgacttgaagcatattgctggacttgaagtgttaacaatatgcaattcctgctcttgcaagttgcagcatatacttggtaattgcagggatttattcatgtttctatgattttgtgactaggttgttttttatgggccgacaacgtccatagacaggttctcttaatttgaattctgctgtctgaagttgagcttgctatctaccatgtgcttcaatcatgcctcaggttttgggtgagctactagtttgagccttactgcaaactcttgacaagatcatatgttctaggtgacttaagagttttgactgtctccaaataccccatgactatcggatttcattttttatccagtgtatgcaagttggacttctgttgtcttgtcttgcaaaaaagaaaaaatgctctagcattcatatttatgcagtatattggatgcaatgtctctgacattgtggtatagtgtgggtgggaaatgattctctccctttcttttccccttaatatatgtcatatgctttaaactctgttgttgacttctaccagtgttttcagggttcatttgtcagtctaagtgccttgtaaggtattatgacgcctcttgatgtttttctctctgttcatttccgttctttcagactcatgctttttttagtttttgttggacaattgtgtattttggacatgaaattgcctgttggaaattgttatctttctatgacagcaggggggttctctctagtagtagaaatgatgacgtagcaagcaaattgttgtgtgggatttccagctgcgggagttcttctttaagttctgaatggctttagaaaacttatgtggagtttagaagttagtgtaatcaaacactattgttcagttccttcacaattacaggcttacagcgttacaggatcaacctcttgtatgcttagcatcgatgtctgttatgttattctagccttgctggatcgagctcgcatattaaaaaggtgtacgtttgttttattgttgttggttgccctcacttgtagggatgttatttttctttggaagattgggtttctcattctgtttcatttctcacaagagtttttccattaattattccattttcattgtgatgcttgtcttggtgctttcatagcttcagaggtatatgaaatagctgcacttgaagtactgcatagaccatgctcttaccgcatatagttgtgaagttgtgggaatttgtggtacaaggtttggagtcctaggtgttatatattttgctacttcgaacatgaatcctttcagattggtgatttagtttctcaatttgttctatttcgcggtttccagtacttttgtgtgaccaggtggtttaaggacgaatcggttattatatatgaagttcttgtttagtgtaatcatgtacgagatctgaactgttacatacgggtaagctaagtcttctggatactctttccttattcaaagagcagcatgtatcttttggcacaagtgttctctaagcttgaagtttgttgtcacaacttaagtttgctagctaacatcatgacatatgttgtttgggtcatgcctcaggttcatgattattttatgggaatctactttcaattgtcccattaggtgcgaggttgtgttttgaggttatagtgttttctatatgtatgcgctgaagtaaattgttggtttatctatgtttggtagcaaagtgaagcattgtgattaagtgtaaattgtcgttttttttgggtggcagcaaatgtgttatgtgggatcctcttgaagttgttaagtgagagtggtggcagtctttagccacctcatcctttctactgttctatttggatagcgattacaaattatagagtgcttgttcgtcttttattccatgttaacggtctgttcttcgcttctgatatccgattgatttttctgaagtttgctagtacatttatatggtgctaatggattcctgcttcatggtccgtatttggtcagtaatgtggaaatattttctttgcggtgtcactttggtgttcgtacctgaagcagaagtacaaacttgaaatatgcatccaatattcaaaactaatatagctatatatcgaaagaagctgagcagaagtattctgtaatccaccagggttgaatctcagaatcaccattatcatatgtcaacaaatgcaaggatacacaatatgatatatcggaagaagctgagcaagagtattctgtaatccaccagggctgaatctcagaatcaccattatcatgtcaacaaatgcaaggatacacaacatgacacatgaaactcattaaactaaaaacgaggaagaatgtttggccaattgattttgcgttccactctttcaagggtggctgcttctaggcaaacctcctggctttctctgcacccctacctcctttatcactgagcggtcatttaggggccttagctggtgatccaggctgttccctcttgacgctgaagcttatcccccatcatctcactggccgttatttggaggtcatatctagtattactcgacttggtaccgctctcgcggtccgcaccgaaacagtgctttacccctagatacgcagtcaactgctgcgcctcaatgcatttcgtggagaaccagctagctctagatatgtggtttttgattctggtttcgtgaaatgatgagaaatctttatgttaagcatatgttgggggcttgtattgggcctttgattcttgattctcgttgttttagtgtttagaattttgctttctttcgctgattgatattctcttggctaccacagttagcttctccttatgatgaatgtgaagatatatgccgtgagatttttttggcgacaggtttgggctgttcagtctttcctatagggttttattgcagttccttatgttggacaacgctgatgccaccttctttctttacattttaattctcaggtgttgttggattttgcatggcttgtatgaagctcacatgcaagctgagaagtgagaagttaaaaattattgattgtgattttgtacatacacatctttttatgggatgggtcttcatagtgcttgttctcgaaggactagtttagctggggcctgggtgtctagatctgacatcaatagagttggggattagatgctggttggaacaagatttcttccccctgttccctccagtagatggcatcttcatcgaggatagtctgttgatttacatctttcagatctttgattcgactcagctacattccttttatttctatgttcgagttgcttttcttatatgatttgattgaacaactaattatttggcccatttttttgtagtgcattttctctgatatagtgttaactttagttggggagttggtgtgttagtcctctgctacaatctctgttcagtaggtactctttatgttcctgtctgttgtattggagtttctttgatttatgaagaggaatatatgttaacaatttgtagtgaactttttccttttttttccaggggtgttaaagtcaagtatcgctcactttctataggacattatgtaagcatatgcattgtgagaatccatgtatctggatgattttcctcctggtaattctttttggactaatgactcatgcattgtgagaatccatttatctggaggattttccttctggttattctttttggactaatgactgatgcattgtgagaatccatttatctggatgattttccttctggtaattctttttggaccaatgagtgagattttattggtcattggtgcattttggaatatgagattgtctttcagatattattctatcttcaggattgggagttgcatcaggaatgatgggaatggtgaaagggttggaattttggattattttggatttcgtagttgcaggatggctttggaatttttttgtaggaagtctgtgtaatgaaaatgtgttatgtaaagtatgcacaatccattatggtattctggcttgctagattgagcttttatagcaagcagtgcatgtgtagtttgtctgagggttgttagccgtggttgattaaatgcaggcatccttctctgccgtaaatagtttctcactctgtctgaatctcctctagtagttgtttgatgtgcaatatatgaacaagctgtcatagactatgttcttattgcatatgctgggtatgttcttatagcatatgctgggtagtccgggaccttatggtaggtttgtactttggagtctcatgttctagatttttgttggccactttgaacatgaagatctttctaggttggtgtgtgctatagtttttcttttacatcattacaataatggtgtatactatgtatctgtatatgtctccaatgctgttgtatgaccaggttatatcataggcgagttgactattaattttttaacaggaaaagctgctcgctatggtgattggagttcttgtggagtgtatgcgtgaggtttatttgataaggctaattcatttagattctgtagatttacacccctctaactaaagaccaacctggctaattcatttagattctgtaaatttacacccctctaattaaagaccaaactggctaattcatttacattctgtagatttacacccctctaactaaagaccagggtgtatgtttggttgaaaggttctcttaagtttgaagtttatttgttaacttcagtttgttatctatgatgcagtatttgggtcatgcctcaggttgatgattttctagatacttataatatttttggaatatgaggtcgatgttttgagggtctcatgtttttctgtctaaataagatttagagtactttgggtatctgcagagtgtcattttatctgtagttggcagcaaatgataatgagtcttaagaaaaaagatgttagtcttcaagaccgctaaatttgtcctgcttcaatttcatattgtcatgttaacttttcagggattcaagtggttgcatatactttagggtacatgttttcaggctctatattttgttttgaggcctaccaacttaaagatgttcgtcttccagaccgttaaatttgtcctgcttcaatttcatattgtcatgttaacttttcagggattcaaggggttgcatatactttagggtacatgttttcaggctctatatattttgttttgaggcctaccaacttgagcaaaacttaatgcagctatatcgtatcccagctcctgctctgagggctacagcttactctctgcaaagaaatatttctatcaatattggactcactttcttattgagttctgatgttgattgtataggcttcatcaatttctagggttatacatttttagcattggttgcattaacgttattatggtttcttgtctaatgggacgtcttgtacattcttcattgatgctatactcttgaattttcagtaccaattttagatatgctcttggtacatttggattataattttttatggcttttggcttctcatgtgtgcatgcacgacatttttttggttggttttctgtcaggaaaatgtaggttgctttgctgattggaaggaactttttgtattatctggctttcaaaattagggtttactttcatgtcatatggtctatatgccatttcagatgtcatattggtaggttgtgttggacttgtacggttgctgattttgtgctcctcactgtatcgatatggtctttgtagtgtcatcaactattggctgaacgtgatggatttcgagtggtcttgtgctgatttaagctgtctatcatttcttttggggatgatctgctagtatatcatcagctctttggagatctactgtactaatatggaaatcgattttctttttgatatttcagctgattctggaccttgctttgtgcttcatgttcatctcagatgattttagattcttcacacaaagttccatgtgaatgtgtctcagatatgtgtcataatcttacagttgttgtcatgactattggaatgatgtttaaatttggctggactttgctgcaagctggtttgttcaccaaagtcatttagttataacttatatatgccgtatattatccttgaattcgttaacatgtgatggtgacatcgagctgcaatgctgatggatcagaaaactttgctcaacttttgaagtatataactttgtatcagtttgtattttgatatatttctttatcgtgcaccaagttcaatcttctgcttgatgcccatgttgatcttgatgttactgaatgtttaactgagtatatggtgtcggtgtctttctttcccgcttctagctgtgttcatcttatggctgatctcattgattagccttcacccatgtggccatgttatgattttgtgacgggaagattctttactttggtatctacatatttggttcccgttttaggttttgcttcagtagatatgttgtggtgtactgcttaattgggcttcagttgtctatgtcccagttttggaggtccgtcctgaatttatctttgcaaaaactaccaagtttaccatgtttttaatatagtctggagtttggactgtgtctttctgcttccagttcatatttatattactttttgtttgattactgccagcggcgcatgttattagttgagggactagcaaagaggagccttttgcttttaacttatggaggaactgttttcttttgtggttttttttggttgcagatgttgtgctccttgatatttgagggaggctcgatgggaaataacagccttagctccttctaacgtgctgttctcttcattcgttaatagttctccacgacttcactcccttttccacatgcttttggttagtggtggatccagcgaatgaacaaactgaacccacgcggatccgggtaaaaaactgtgagaaaccaaaaaataaaggaaactaaattgatggtatatataaagaaacacgcgtgatatcttataatatgacactcagcgttgaactttggtcttttgggtacttgtgttcgcttattcggggtcgcgggttcgatcattgaaggatgttttgtttcattgcttcttatcttctttttctttcctttttcttatgttttgcttgattttttttttttttctctttcctctctttcttgaggggaattgtcttcctttatcttatgtttagtttcttttattttttctttgttcaccatttactttttagctctcctttttatctatagatctctctcccacccggtacaaaaataatagaaggtaatggttaatgaatttggtttgatttccattctctccccatttcccttggttaagcaataaattaatcatgcatttagtcaaaaaaaaaactatgttgattacttgatttagtgctcagatatatttatgagatgtgttaaaatgtgaatgataaatgttctatattcttgtatgcattttataaacttaatgtgcaaatattaattggaagaatttgacacattacttctaaaacaaattattgacaaagcttaatatcacccaaaatgcgaagagcttattagtgttattgtgttgattcgttgtcaattagtcatttaagatttcatatttgtgctaagttgttaatatatatatatatattttcatgtttcatatcatggatgtataattttttttaatgtaataaaaaatggaatctccactaagtacaattgttgaaagctatccttttctttaggaatcgaatctctagatagtaaaatgttatttagaatttatattcgaacaacttcgaacccatgtggcttagttcttgtattcgccactgctttttgttgatacacaattataaacaacttgattgataagaaagatgcttgggaaggatgttgttcattcctttttgtttgttcctatttctttttgtgttgcagcttgattgataaggaagaggtttgggaaaggacgttgttcattcctttatgtttgttcctattcctttttgtgttggttgctaatatctctacctacatctcttctttccttgatagttgatacttatatttttctgtattgaatatcgactcgcacttcatttgtgattctttgtagacgtttgaattcttatttcagcatattagaagaacatactacaggtgtatgctttcatactattttcgtatgctctcagtcttgggtgacatatctagtattcttgtattttgatctatgttgagtttgaaaggtccctagtttttatatttattggtttactggttaattggtcatatcctgatgttaaatttgtcagtagttttacttggttgggctcttaccttgtatggcttctgggaaatcaatgttgatggtcaactagtgatttaagctcataaagttctggcatatttttgtgattcattttatgatgatgcacgcgattagttatttattagttattccttgagtcttttctttggcgcggactgattaccttgtaattctatctgctgcattaattttgcagcttcatgatcattttgtcgatttttcttctgttctacgcgattctgcattgtagccttggaagttcttgattaaggttgtagctgttttgttttcatggggaatcattggagcacaatacgactcttgaatggtaacaaatcattatttccaatgtttgctgggatgatttgataataatgatatgttactattcaattctcatatccaagggtttgtgttgcattagtaacttcatctgttgacaaagctgttttctgtttcttttatttgattttttttgttcttgtttttgtgttaattagttcttgttgtaaagcatttggttgctgctaaatccgttggctcggggatatattgttggtaagaggtgtctgcaagtgtagagggagttgtttgtcctgttagcctccattttcttggtatactccatacatatgctccgttagattgtttttttcttgttgcagattgtttctgctatgatggtgctcatttgtcaatgaggcttcagttctggtacatttgcatagtctttcagtcgtcttaaggtatttaatgttttggaattcactgtagtgctcatgtctggtctttggttctaaacagtttatgagcactttggcaattgattcctattgctgaagaagtggatgtggtactgtgtgccctacctttgtaagagctggatattttcttgttgcagattgtttctgttatgatggtgttcatttgtcaatgaggcttcagttctggtacttgtgcatagtctttcagtcgtcttaaggtatttaatttttcgaattcgtgatagtgctcatgtttggtcttggttctaaacagtttatgagcactttggcaattgattcctattgctgaggaagtggttgtggtgccttgtgtcctacctctgtaagagctggatattctggttagcaatcagaaaatttgttttcccttatgctgcattttttgtttcgggattcgtggtagcgcttatgtctggtttggttctgaatagttgatgagcactttggcagttgatatctattgctgaagaagtggttgtggtgccttttatcctacctttgtaagagctggttagcaatcagaaaatttcttttcccttatactgcaactttttaataatttagtactcctgtagtatgcgatttgtcatcctattgtcgctgatgtagtggtatagacatataatttttccttcttttaccttaccatttctgtcatatatgtaaaggtatatgctttaaactctgttgtttacttctaccattgttttttaaggatcatgttacactaaaatagaatatcatgtaagtgcacctcacatctctcttgatgttatgttctctgtttatttcccttcttcagactaggttttctgtgatggggttttttctagtagtagaaatgatcaagtgacaagaggattgaaattttggtgttgtttctactgtagttcttcaagagatacaggctttagggaaatcatatggatattggttggttgggtcaaagttacggccttacaggttcgacttcctgttttcacagcgtcaatgtctattatgctattctcgccttgcttgattgatttctcatggcaaaaaaaagtgtatgtcttgtggttgttagttgcccttgctgggcgccctctttgaaagatttgagtttctcgttctgtttcagtttctcatatattatggttaatgatggtcttgatgctttcacgacttgaaactagctgaacttgaactatgtccaagttgcgatagaatgtacttttactgtatatactgggtagttgtggggattcgtggtacgagtttagaatcctatgtttcttaagctttgctatttcaaacgcgaatcctcttggattggtgaaattagtttcttattttctttctaacccatttacatgcttccagcattgtagtgagaccattttgctttgggatgagccggtatgtatgattaaatttcttgtggagtgtgactatgtagtacactgtacacgatttggactgttcctgtgaggcttatttgggtaagccaaatcttttggatcttgtagttttactttttccctatttaaagaccggaatgtatgtttggcagatttgttctcttaaattgaagtttgctgtcttaagttgctatctaaaatgtggtggttgggtcatgcctcaggtttgtgatgatcttatacttggtctgctcatggggatgtagttttatgtgaatcgaatcaggttcatgttctaacctttgtttgtgggtcaatactcaatactgtctccactaatgttttggttttcttttgactccgagtagtcttcactgttagttattgattttcagttttatgttgtgtgtttgccgtattaaatcctcggattcatcgacatgagagtggttactggtgttattttgtttctgcttctgattctcgggtatataactattttagtgtttgaatatctcatgcatattccaagttttttctgctttaggggtgtgtgttgattttaacgttactggttgtctcatctatcatgcatattccaagtttttcctgctttaggtgtgttgattttaacgttactggttgtctcatctatcatgcatattccaagttttcctgttttaggggtgttgattttaacgtgactggatgtttactggtgttttggtgctgccatctctctttcgactccaggtattgtgcttatcttatggttgaggtcattggtcagcttctcacctgctgtgattttgcgatgtaaatattttcttttcttctttacagatatatttcaccttttcagttttagttaagcaggttccttcttgaaaaaacaaatttgaatgtgatgctatgatggtggtattacaaactgagcttttgcttatccatatttagctcttggttttgtcctgaattggtgtgtgcaggcacatgccgtgttatggagttggacttttcctacttccaaaattccgaacccaatcgtttctgtgctactgaagcctaattggctggatcgggagttttttctgattcagaaatatgtcgtttcactgcgtaaacccttcctgcttcatgttacatgatgtttagtttagtcacaggaaagttggattttggtggttcttggttgtaggctccttgatgtttgaggaagatgttggatgaagaactgtagctgaattttaatgtactatttttgtcagttgttggtagtcttttggttgtagaacgtgtgtattatggtcttctgctgatttgagaagtggagtttctcctttttttttttgtgcgtgctcttttgccgtctgtttgattgacttgctaatgtaagtacttgcatattctttttcatgtattatttatggatgcctgagttcttatattagatatacttgtttctggtgtgtgtgctttcatcctacacttccaaatctgggtcatttctgttctttcatttgtgtttttcattcgtctggttgctttcatttctatggctctggaatgcttttataggaaggtttggtggaataaaaatcataggtgaatttaggtcatggttattggcctgactttctttgtgtttacaatggcttatatatactacgttattacttatcttgctagacgaaatgtatgtgtagtctgtctcttggttgctagttgtggtcacttaatggacgagccctgctctgctctatctcaacttcttttaagactaggttagctgtttatctgcatcatcatgggtggtgcttacagcatatattgtgtacttcgggaaattgtggtgtgaggttcgaagtcctatgttctggatatctgttggctactttgtacatatgttgtttgatgggagtgatttggagctgttataatcatttaattttgatttttatagatttactcacctgtgaaagatcagcaatgtttgttttgaccaaagttttctcagatttgaagtttgttcccttaactccagtttgctatctatcatgcggtgtttgattcaggccccaggctaattatcctctgggcacttcttagaatacttttgtcatatgtgagaggcttgatgtttatttgccatatttgatatcatgttggtcataggttgtgaggggggttaagggttcgtatgggtgccttcatcatttcttgccttcatatatacaaatatttttctgtattgaattggtttcctttgtgattctggttgtggacttctggattcttatttcagggggtgtttggtaagattaatggaaacggaatggaaatgattttgataaggagaaatggaaataataatcgttacctttaataattgtttggtatcttagtggaatggaaaacaattgagaggtttatgattgaagaaggaaacatgatttgtttctactagtttgataagggtaacaaatggggggattatgtttttctccggaaacggtatttgttacttaatactcataccaaacaattggaaacggaaacgcttatttgaatccgtgtcttacatcgaaagttttcataccgaacaccctctcagtatattaggtgaacatgcttcaggttctagtcacggccgagtattcacgtgtaaggtttctcctattatcctatgcgttcaaattctagtcacgtatgagtggtaattttgtatgttgatctatgttttttttggcatttatttttacatatatatatataatatatgttctaaaacctattatacataaagactatatatttttttttttttattttcgcagatggtttacgacataggtcctaaggattatttaatgaggcattaagtgggggaggattgggatgtctgggcctataagatgagggttgcaatggattatagaatcatgtaaggaaagtaggggttaaagtctgagctgtcaataatacattttatgtctcggtttgtccaacacatagagcctgtaacaccccgataattctctctttttagaaagtatctttataataaacaagtagagaattatccagcattatcgcggtttgtccaagacatagagcctgtaacattccggtaattctctctttttaaaaagtacctttataatatacaagtagagaattactcaagtattatcgcccgtgtgataacgtatcagcttatttagaattttgcggcggaaagcaatatactaaaaatcaactttattaaaacttactaaataaatgacaagtgtttgaaacttaacccaacttaaatgaacaactatctgaaataaatatgttcctacgaaaacagaaattaaactatgttagatatacaatctctccacttcagattcccaatgagatgcgcatctacgaagctgtaatgttaatgcaatattgactctgttcaccagaaggatcatcacaggatcaataggcaaagctctgatcacacatacaaataaagcacgtaatcaccaaagctgagtactatatattaaacataagtaatcctaaacatgatactacataaataacatgcagggataaataacaatataagcatataataatttgcagacaatttttattgaactagactctaaacatcatttcttcctttaaatgaaatagtacttctcaacaaaacataaataacatgattcgctttataacatatactaattcttatacgaattaataaataaactttttgacatgtttgcatcaattattccacacaaacatataatccaatattcatactaaattccaagtcacatgttgcacacaggcataaacatgtaaaacaattttagaaatcagatatatgaacaaagtaggctcctatacatgatactaaaatttaaattctctttagaacatgatactaagccacatagcacgtaattatgcacgtacctcgtgtaaactagcatgtaggctacttttaactctctaaaagttcttacgatatattctccgcctagaaaacaaagtaactaaaattaataacttaaaataaaaattacagcagctttaaataatttaaaaccccttaaaacacgttttaaaaatcggttttaagtatcaaacttgaattatttttaattcctagtatagtactactattctagtaattaaaaatccttaaaaactctatgaataacccttttatgaaattacagcatctttaaaatctaataaataacctttaggctcaattcatggcatttcttcttcactttttaaaaatctaacacgtataccttgtagatgacatgtcaaagatcaaactctactatttgcatgtgaaaattggtgaagaacgagggagatatgaagagagagaagatgaagctcacatttcctcttcttcaatgtgttggtagcaaggggagtaaagagattatttgtaaattgaaaatgagtgtgcgtgggtgaggatgaataaagatgggttgggtgaatacctctttccttagtataattactcttttgtccttgattttaccttcaaagtaaggatatatcggtctttctatccttacaaaaaaaatcagagtattcatactctttcataatatgatagttcctcaagtaatattattagtcatattgttcatgccatactattgctttcttacttatccttgatttaattgcattttccccaagtatatatcattaatcatttattgattactcttattcaatctcttaatctctaataaattttctactttcaaacgacgaatataataaattatatataataataaaaatatcttacttagtacttgaaaagtaactagaaagacaagttaacagttttaacaccttagacaataatcctaaaactatattaataatttaagaatcaaattttggggtggctattacaccttaccccactaaaagaagtgtcgtcccaaaactttaacacgcacattaaaactaggacaatcaaagtaggtcaagcctcatatggatatgtgcgtaaatcaatatggtcaaggttttccttttgaaaaaaaaatctttaacacaattcatagtttatacataatataacctatatattaattgatcattatcagactcgaaatcctaataactagctaagtaagttaaaaatcacaatttattttcttttagttctttcaaatagttcgcatataaccgtatttaaaactcaactcaaatttcataggataattccaatcaaaaatcataatgaactaatttgtcaaaataatactccaaaatatagtgcaaatcttatccaagttatagtttagtcataaaattgctatagcgaaagttacgtctatgtagaaaataaacggaggccttgttaggaacaatatactaatccattcaacttacttaaattaatagtttaaaagtaaatcaagaaatatataatgtatagaataccatatattcttatagtagtattatatgtgtcttagcttaaaggtattaaaaaagtgaaagtattggatcagaccgtctgacccaatgaatattgtcagacgggctgagcccagtactgtacaattttaatttttgctttgttacacagcgacgccactcctctcgtattgaagaagaagattaatatacaaaacaaagccacttctctcatattgaagaagaagattttttttttgaggggagaagaagaagactaatatacaacaaaaaaaataaaaagaagaggaaccagaccaatcatctttctccatttctatgtaacttcctataatcactgtctcaacctctttctccttgttctgatgatgaaactacagccattttgataaacttcgccttcaactcttcaatagccgccatgtgcttctcacttaaacttgatgatgagctcatttcgttttcagttagccattttttctatcttttttggaaaatatagatgaggaggacagtgagaaaattagctagatattttcccacagcaattgtgagcagaagatgtcgagacaaagtgtaaattttgttaagctggcagaagaggaatgaagaagaaggagaaagtgagagaaaacagaggttagtgttttctttcttttcattggactttgtttttctttcagttggactttgttttcttttcattggacttgtgtttcttttcattggactttgttttctttcggttggactttgttttgtttcggttggactactcaaaaaaaatgaagactaccgaaaaagaatgaagactaccgaaaaaaaaatgaagactacccgaaaaagaataaagaccaactggaaacccaaagtaagtctaatcaagtacaaaaaccaactgaaaaaaaaaagaagactaactgaaaacgaaatgaagactacctgaaaaaaatgaagactacctgaaaaaaattaagactaactgaaaaaaaattggaaccacctgaaagtcgtccgaccaaagattatggtcggactcgtccgacacaatacgttctcattaaaaaaaatccaacaaatttcaagacaaaacttgcctaagtctagtgagtaataattaaaaccaatgtattggatcaaccttgataaattcggatatgtactttagggtttttgatataaataattcaagtacatatagcttcgaaatagcaagtcaaactcatatatgctttataagttaataagaattacttttaaaaataattatttcttttcacaactttgcatcggcaaagacctttatataaccaaatattacctatcaataaaatcgaaaacggtgacttataacacgtccttcataaaggccaaataagtattttgtcttttataaaactcatttatccaaacttagagaataagtatatggaagagttccaataaagaataatgtttcaacacaaaacaattatactcatttatcaaatagggtcgcaatattaaaacttctcattaaaaacttgaaggaagagcttttgaaataagcatttataaactcaatagttgataaatatttgaaatattcctacctaaaaactcataactatactttcataagtggcaatgacttcaaatcataaatattttcccggacaatatataattagctgtttataaacttgtatgttctatatcaaaatttccgaaaaattaactcacttcaaacaattataatccaagcactaattaagattaattatgatcaaatgtataaggttatcaaaataatataataaaattataagaatcgtaacatatcggtgaattttcaaaatttgaatcaaatcctaattatgtatgattttttaaacaataaatctaagaaattatttattacattcttttcaaacctatataagatagtagtaaaatgatagttcttttgatttgttttattccaattaatagttagttgtaacttgtaaggtgaaaagtctaactcaatatacataaacatgcatatagttaaaaccaggggcggatttactatgggttcactgggttcaggtgaactcaattatttttggaaaaaaattgcccggtttttttttttatttttaaattaaaaaatattttagatattagatatatactatatgcgtgcaaaataaaacatgaaagaagcatgtgtcctagtggttttgtgtctcatttttttttcccggctccatggatacgccactggttaaaaccaccaactttactagtgaattctattgaaaccaattaatccatacttcacataatttaagttttgaaaattgagaccgcaaatactaaacatgttgtcaatttaaacatatttcaaggtagctcaattaaactaagctactatacatattgaaaacaatcttgaataactagttttacggaaacataaacttctatatgtaatacatgtagaacatttatcgtaaaaagaaattatataagcacaggttctatactagtaatggacggacaatggacaattgtatcattactcttcatcaaccaagaatcacattattgctcaaattccataattatgcattgtattcacctcaactgtactaggataacatgaaaccaatcaataagcattatcaatttctcactacatttcacttgaagggactaatatgattaattaatgagatacctcaagaatatattagagttgcccacttacaatctaaatactgatttttaacctcaatgaaccaacacgaatacctaaattctcaaaataactcattccttgtattgtcccagtcccactatctctattatataaggcaacacgtgggggacaccaaaaaatagaaaaaagaaaaaaaaaatagaggacaactaactgttttttttttaatgaaaaaagggggaaagtaggacatttaaactaaacatcaattttttgagaaaataaaatataaagacgatttttctgcctgattaatattattttctactgcatttgttatcacacgtcatcgcacgcattgcgtgcatgtaagactagtaagaaataagtaaaggaagtagattgaaaattcaaaatcataatttcaaatgttcaaaatcaatagcttatcaggtggtaatcgtggtatcatgcataggttaattcatttataaaaattaagacaagtaaattattatgatatgtaaaccctccatgtatgttacaccataaggaatttaggtcttccattttaaatagaattaattttagaaaagtataaaaacagaaaagcttcgtgattccacatgagcagcagcttaataaaaatggcaaaagcagcactgagattacaaaggatataaatcctgactcacatcttcaatttgagtgattttgagcctaaattcaataacttctcgagatctacaactgtcgtgaagaaacaattgtctatatttgacttcgactgtatagtgaagatagttaagcaaataaaggcttgtgagttgcgaatataaaggacataaataacatggctttaggcttttaataacatgagattatttcagaggggaaataaaaatgtgcatactaccacataaagaaaatggtaacaagatcttgacacaagaagatcaaaagggaagcatcactgtagttagttctcatgccaccacataaagaaaatggtgagagaggagaaatgaaatgaggtctctcaaaacagtaacctacaaatacatttcatttacttgaaacacatcataatttgtaaatgatataaaagaggttgtttttcaaaaagaaaaaaaaaaaatcagtaccaccacgacagaatgcaaataattaagaaaatcatgtttaattaaataatcaaaatccatactaccagttaaatgaaaattaaaaactcccaattttcactcaagctatttataagtattagttagcaaaatttaaaacaggttctctaaaacaaggctattacctactacaatccttagaacaaatttctttctcgaaactgaacacaacattttacattatttcaaattgatagatcacattaaggggtcgtttggttcattatttttgagtttcaagaaatggaatcagttaccgattccctttatttttgtttggttcaaccccacatcaatccttaccattacttgatgttaatggattctcccaatttattaccttcccctccccctcaagtaacaaaattcattacttataggtaatggttacccttcatctccattacttggcttgaaccaaacatccttacactcaataaaggtaatcatttctattaccattcccctcctctatttgtatccattcctttttcatttcatgtattgaaccaaacgaccataaaacaatcttgagtggaaaccaaatgaaacgaactcctatctctttgataatattccatgaggtcgacctctaaccaaaagaatgataactgaactctaatttcatttccttcttaatcccaaagtgatacaactcatacatttacaaacattagcttttacatcttcctaacgcacgactgcaatgctacatcataactaactcttattgtgaacattggatcaggaaattcgagatgcgatgtttgatttggctagtaataaatcaccgggaattgatggtattcctgctgacttttacaaaattcattgggcaactatagggccgtcagttttacaagcagtaaaaaggtttttcactactggccatcttctccatgaatggaacaaaatactgttggttcttattccgaaagttaaccctccagaagaggtatgataaatgtatagcaaaatgtatggtcaatcgaatgaagggacttctgccgaatctaatagaagattaccagaacgctttcattccagggagacacatggatgacaatattttgatatcacatgaaatcacacacatcataaataagcaaaggacgggggttcgtcatctggcggcactaaaactggatatgaacaaggcttatgatagagtaagctggttgtttattctaaaggttctgagggcgtatgggtttcccaggtattggattcagttgattcaccaatgtattaccacagtctcgtatagagttctggtaaatggaacggcaaccccaacattttgcccaaactgtggattacgtcaggttgaccccctgtctccttatcttttcctcttctgtatggatattctttctcgcatgacaacgctggctacagaaattcgacagattcagggtattaagattggaaaacaaggcccgacaatatctcaccttttctttgcagatgatgctctcttcttttttcgggcttcttcagatacctgttgcgctatcaacactttaatttcaagattttgcaatatatcggggcagatgatcaatcgccaaaagtcctttgtaaaattcagccctaatatacctatggatcagcgtcaaatatacaagaataatcttcagctggatgataaaaattcgcttggttcatatctggggttcccaattgatattcaaggcccaaaagtcgagcactttacccctcttctggatgttgtctcaaggaaaatagccacttggaaccatacattgctttctcagccgactaagcttataatcattaatccaattctggtggctaccattgtaacacccccaaaatccatacacgtctagtgctacgtcgcatcgactttgggagtgttaccgccgcgatggaacgcaaggcataattagaaatacggtaactcaaattcattgtctcaaaaccaaattgcaatggaatagaaaatgtaaatacaactcgggaatcatagttgacccctctttattcaaactcaaaccatgtaacaatgttctataaaattcaataatactcaaaccaaaagttaacttcaaactacgcctagcccccttatgcttgatatcatgcagcaaagaccagctcacctagttctgctccccattgaagtgtcaatagttcatcacaggacaacaaacacataataacacacacacggtcggctatgctttgagtacgtaatgaaccattgaaactatatgaacataaatgatgcatacattacaatcgctatatgaacctacgtcatttcacatcctttaatctttcattatttggcatcgaacgggcaccgtcatcttactagaatcatacggactatcgaatccttaatagacaacttggtctattagatgaaatgcaaatacggttttgttccgtctcacacccatcaccttagtatgcatacccccaagatcgaacggaaccttccgcctacttgagttatcaaaatataaggacactactgtcgtcacaagtgagctgcgtagggagtgtaggacaagtcccacactcccccattgttctatacttgtagggaatccaactacaagtatcgccataatcttcttttactaccaaccattctttttataactttaaggagtcatttacatgctctcttaattaccaaactcaatctcatctctcggtaacactcttgttactctatagatcgattaataatgccgatgttacactacgatagaacttcgcatttcaatgcaacatatttcaatgcatcatattgatttcacgttataaacgtctaaccaaacaatcacaatcaaatgttccctatcatggtactaggttccaataacatgaaccgcaacctaatcatgatactaagctttgaaagtaaaccggtacgcgtacgcgtaccttgtagcggagaattttcgccgacttaatagaacgagccgcttatgaaattgggacctaaatcgttaaaacaaagctttagtgttacgtccttgataacactaacaactcctacgtactaagaccataacgatctaacgattcgaattaaacaatagttaaaaccttattccgtaactttcgttataattctaatctagtgaatttaacgccttttagaagtcgagttagtgagtaactaagttagttagtaacattagtccactattttaccaatccaaaaatgtcataagtccaaccttgtcttatgtccgaagttaagtcatatgtccaaagtaagtcatatgtccaaaaaggtaagttccatgtccaaaaggtaagttccatgtccaaagggtaagtcatatgtcccaaagtcgatttcatgaaacacgttactcatgaaacgataataatcagtaactaataataggacacacttttcctactttcaacttattccaattacaaacctaaccagaatttttttttacttaaaacgaaacaataacttaactagttaacaatctaataaattactaaacactctaattactaattattaattacaaaccttacttaattacgaaaacaagaaatataaataataaaacaagtcaagtacataataggtttataccatcgactcaccgggccaaactccggcaatgaaactccggtggcctttgctcgccacacacgcccacactcgaggccctcttcggttggcgcgcgcgcagcagcgacgcacccctttcgccgcttcgctcgcacaacaacacacacacacgacccacgcgaccctcgtcgcagcaagacggttcgcacgacaccctcgaacaccgcgaccctcgtcgcaacaccgaaccacacacacgccgcacgaaaatctcgacacacccgcacgaaccttcgacccttcgcaccgaaatcgcacgatccttcgcgcacaaacctcgagcaaaaccctcgacaatcctcgcacgatctctcgaccctcctcgcctgcgcaccctcgcgcgctcgaaccacggcctcctccttcgcacccctcgacgatctccgagaaagaacacggcgagggagacgaagggaatgaagagaacaagtgagagagaggaaaaaatcgagggagagagagatccgagagagagagagaaaattctgagagagagagagaaaggaaggtcggccaaggagagagagagggagaagaaaggtcggctgaggagagggagaagaaagggtctagggttttctgaaattccctctccttttctttttatacccccttcaaaaggtagtaaccctaggtcaagtgaagattaggttactcttttaaaactccgaaaatgtctaacaatttcatattaataataatttattcctattaatttgtaaataaattaaaatacctttttattaattctttatattttcataattagtacgaaattgctactaaaaatacggagtattacaagcttccccctaaaagaagtttcgtcccgaaactttgaggtagcccgtcttaacgacgatcttttgcacttctaagtcccaaatttcacaagcgttttctaacgttcacacaatagataagcggttttcacacataactagcatataactaacataattaacataactaacataattaacatactttggggtgaaagcgcgaaattctatcgcattcttcccccttaaaagaaaagttacgtcccagtaactcacgtacctcttggaaaagctcaggtacttactgacgcattgcatcttcggcttcccatgtggcttcctcggtagtttgatttctccacaacactttgacaattccgacgtccttattcctcgtactcgcactttgcggtctaggatctggacaagtttctcctcataggacaaggtttcgtctatctctacgttttcgggttcaaggacatgtgacgcatcaggtacgtatctccggagttgggatacgtgaaacacgttatggaccctttctaagtcgttgggtaaatctaggcgataagcaactttccctaccttcgccagtatctcatagggtccgatgaacttagggcttagcttcccctttttcccgaatcgcatcactcctttcattggggataccttaagcaacactttttccccaacttcgaaattctcatcccttcgcttctggtccgcataggatttttgcctgtcctgtgcagccttaatcttttcttcaatgactcgcacttgatccactgtttcctgaatcatctcaggtcctaatactaccgtctcactgatgtcgttccaacacaaagggctacgacactttctcccgtacaatgcttcaaatggtgccatcttaatactagcatggtagctgttgttgtatgagaattctatgaggtccaaatggtcttcccatgacccttggtattctaaagcacatgctcgcaacatgtcctctaaggtccgaatagttcgttcgtttgaccatcggtagagtgggtgaaaggtcagtactcattaatagctcactaccaaatgcttcctggacctttttccagaaattgacaggaatcgagagtctcgatccgatactatacttgtgggtactccatgcaatcgaatgacatttttcacataagccttggctaagacttccatactccacgtatctttcataggtatgaaccttcttgtcttggttagtctatccactatcacccaaatggtattattgcctcccgactcctaggtaaggcgacaacgaagtccatggatatcgagtcccatttccatgtcggaatgtctaagggttgaatctttccctgaggtctcttgtgttcacttttgactttctggcatgttaagcatttggaaacaaactcagctactgctcgcttcataccaggccaccaaaacatcttcttgaggtccttatacaacttgtctcccccccgggtggacagaatacgtcgtgttatgaccctcgctcattatcttttgtttcgggtcttcttcacacttttgtggcacgcaccacctacccttatatcgtatgcttccatcctcatggatcgcaaacccctctcgctttgccctccttaagctttgccttgactcgctcaagtttcacatccccaggttgactcgcccttatctcttctaggaagttaggttcgatggttagggcactcaaagcaatctttctacctccccttcatgaacaacttctatccggagtctagagaattcctcacaaagtttgtcggcaacgactaatgtattcaggctatggctagacttgcgacttaacgcatcagcaacaacgttggctttaccctcatggtattggatgtctaagtcatagtccttgatgagctctaaccatctcgcgcgcctcatgttgaggtctttccgggtgaagatatacttaaggcttttgtgatcggtgaagatacggcagggttaccccatagaggtagtgtctccagattttgagtgcaaatactatggcggccaattcgaggtcatgtgttgggtaattgacttcatatggcttcaactgtcgggacgcataagctataactttcccgttttgcatcaagacacaacccaacccatttttggatgcatcactatacacatcatatccttcgttcccattaggcaaggttagggcagggctgaggttaacctctctttgagcgtttggaaggccttctcactgtcctcattccgtgtaaacctacaatccttcttcatcgggtttgtcataggttttgctattttggagaagtctttcacaaatctcctatagtaacctaggctaaacccaagaaacttctaatatccgtgacattctttggggtaggccattcactcacggctttgattttcgcaggatcgaccgatacaccctccttagagataaaatgacccaaaaatgacactctttccaaccaaaattcacatttcgaaaactttgcatatagttggttgtccctaagtgtctgcaaaatgaccctcaaatgatcctcatgttcctccttgttcttagaatagatcgggatatcgtctatgaataccacgacgaatttatctaggtagggtcggaaaattctattcataaggtccatgaaaactgcagtgcattggttaacccaaaaggcataaccgtaaactcgtagtggccatatctcggttcgaaaggcgctcttaggtatatcatgatcaacaatcctcaaccgatggtaaccgagaccttaagtcgattttggagaacatccccgcacctcgaagttggtcgaacagatcatcaatcctaggtaatggatacttgtttttcacagtgacattgttcaactccctagtctatatacataacctcaagctaccatccttctttttcacaaataagacgggtgctccccatggcgacatgctaggtctaatataccctttgtctagtagttcctctaactggttctttaactcattcatttctgccggagccatccgatatggggctttcgaaatgggtccgagttcagtattaggtcaacggtgaactctacatctctccttggaggcataccggtatttcctcgggaaagacatcctcggaattctcggactatgggcacatcttcgggccttaacggatcatcctcaactcttctcaccgaacacataaataggggtcaacccttgtctacgtagttcttaagttgtaacgcattgataactttaattcctggttctcgcggtattctcctatatgacactcttttccccgaagggtcctttagttccactttctgcgcatcacaatctatcctagccatgtacttcccaagccaatccatccccgagaatgatatctaggttcgataagttaaactctatcgatcggagggaaagtatccctcacctatcttcaatggcacttttaggaatcttttagaacaattaacagtctcccggatggaatgactataggcatagaaatcgactcggactcgaccaatgttaaatttctaacagttgcatgggcaataaatgacaaggatgctccgtaatcaaataaaactttaacaggagtggagttgatagaaaaagtacccgtgacgacgtctctctacgagcctcttcttctctagccgtcatcatgtacgacttccctttgcccttatcttgggaactagttgcattgttcacattagagacttggttgttggtgttggtcgcgggcttggaatagttagaattcccattgtaattacctccccgttaccattcccgttaccatttccgtttaggggcttgtccccatagttccccttcctttggccattggggtttagcttgtttttcgaatagcattcataggctctatgtcccatcttcccacattcccaggcattcaaccttgttaccctcacaatccttaccaggatggttgttagggcactttctacaccgatatacacgctcagtgcaggttattggtgttgttgttgttgttgttgttgttgttgggattagggttattattgggtcccttaccaaaatttctctcgagggttttgattattctggttcccgttgtgctttttctcaaacttttggccctcggggtttgggttatccttacgtttctcgccaagcttacccccttcctccctcttcccgatagcataaaggtgggcagctttgccaaacacatggtccagagaggtgaatgtatctccccctagtctacccccgagtcaagggtaagtcccaattcaaaacgtgaggctttagcctcctcggtaggggcaatctctcggggcaaacctcattagttctataaattttctgtaatactcctccacagacatgttcccttgctccaaagcatcataaactcccaggctttttgtttcttaagatacggagggtagtacttgtctcttagggcttttttgaaagtttcccacccgaaacccggttggcttagaaggttgtccttagccttgggtccaccagaaatgggcatccccctgcagatagtaactagctaagggcacggttttctcgtcgggacgagaatagggtgaagaaaagcttatcaaattccccaacccgagttctccaactcttgagtcccccttttccatttagtataggtgggttcctacgggccactttttcagataggtccccatcccggctgtgaccttgggctaagttggcgatgtctgtactaggtcacgtatcgattgctcgatattaagagaggtgtcggggcgcctcccgatcgaaccattctcaagaaaaattaacatagtagctatttgagtgacctacacataattcttgttttaacttattcaacgaatacacattcaacatataaacatatattgcgaacacctttaagtctcagacttgacttgcattacaatcatccaaaagaagatgccacaattaacaaaaaagataacactatgcactattattgaaaatgggaatgtaatgtttgtaaagaaataccatatatatatatatataaatcaaataatgttactccctaatcggcatgcaagccttattatcactaacataacaaatgaacaaaaatgatcaaaataaaacaaaaatcctaatcctacatatatgctcacaagaactatgggctaaggcggtgagcttcatcctctgatccagaatcctccatccctccatcaaggtcaatctcgtccgcatcaggctcgccgtcctcaaagaatatatcctctagtatgggtccttggtcttcctcggggccttcttcctcgatgggatcctcctcctcaatgggatcctcctcctcaatgggatcctcttcctgaacaggattctcatcctcaacagggtcttcattctcggccagggtcctcttcctcaaccggtacatcctctagtggaggtggctcgtcatcatcatccccatgtaaccccggtacaacctggaccccacccaacactataatgaaggtcctattgttcctttcatcatcggagacgtaagtgacttgtcctaagattccgaaagtcatcggctaataactcatcctcaaatggtcgatatcttggcctctttgccacagatgcttgatggcggttcgggtatgacccccgggttctcgaaattcccatctatggccctattactcgaactttccccttggatgaagtagaagggttttgacccctggtttcacgaaccctccactcattctcgcaagtatttaaggtcggtgaggaagtgcttttcggaaggaaggttccggtatccgtaggtatgcttattcctattgaaatacccctctcgtagtccacatatccccatacctacgatgaacaaatctatatggctctatgtccggaacataacgaagcttaagtgtatcctagagccctcgatcgtaaccactgctccccttgcataattccgtaatccatagcgacttcattttaaagaaccacatatcccagtcctcccctacttgtttcatcaaatagtccttacaacctatgtcgtgaaccatctgcgaaagtaaaaacaaaatagaatagtctaagtttttgtaaagaggtaagtgctcattttaactttgaaatccacaagtgaaatcaagctcatttcgatcaataaaatagtttttatactaaaataagttttgaatctaacatcaatttaaacctatctttgtacaatctcttactctagtcacatttgaagatttcaagaatctttcaccatttcgattacacagagagagcacatacaagttcgagatacgaacaaaattgcaatgataaccttcctatgacttaatgcacatgacatgatctatatgctcctagcccatactacccgttttgaaatcgtttgaaaacgttttgaaaataggagcttcggctcgataccagttttgtaacacccccaaaatccatacacgtctagtgctacgtcgcatcgactttgggagtgttaccgccgcgatggaacgcaaggcataattagaaatacggtaactcaaattcattgtctcaaaaccaaattgcagcggaatagaaaatgtaaatacaactcgggaatcatagttgacccctttttattcaaactcaaaccatgtaacaatgttctataaaattcaataatactcaaaccaaaagttaacttcaaactacgcctagcccccttatgcttgatatcatgcagcagacaccagctcacctagttcgctcccccattgaagtgtcaatagttcatcacaagacaacaaacacataataacacacacagtcagctatgttgagtacgtaatgaaccattgaaactatatgaacataaatgatgcatacattacaactgctatatgaacctacgtcatttcacatcctttaatctttcattatttggcatcgaacgggcaccgccatcttactagaatcatacgggctcttcgaatccttaatagacaacttggtctattagatgaaatgcaaatacggttttgttccgtctcacacccatcaccttagtatgcatacccccaagatcgaacggaaccttccgcctacttgagttatcaaaatataaggacactactgtcgtcacaagaggctgcgtaggagtgtaggacaagtcccacactcccccattgttctatacttgtagggaatccaactacaagtatcgccataatcttcttttactaccaaccattctttttataactttaaggagtcatttacatgctctcttaattaccaaactcaatctcatctctcggtaacactcttgttactctatagatcgattaataatgctgatgttacactacgatagaacttcgcatttcaatgcaacatatttcaatgcatcatattgatttcacgttataaacgtctaaccaaacaatcacagataaatgttccctatcatggtactaggttccaataacatgaactgcaacctaatcatgatactaagctttgaaagtaaaccggtacgcgcgtgcgtaccttgtagcggagaattttcgctgacttaatagaaacgagccgcttatgaaattgggacctaaatcgttaaaacaaagctttagtgttacgtccttgataacactaacaactcctacgtactaagaccataacgatctaacgattcgaattaaacaatagttaaaaccttattccggaactttcgttataattctaatctagtgaatttaacgccttttagaagtcgagttagtgagtaactaagttagttagtaacattagtccactattttaccaatccaaaaatgtcataagtccaacctgtcttatgtccaaggttaagtcatatgtccaaagtaagtcatatgtccaaaaaggtaagttccatgtccaaaaggtaagttccatgtccaaagggtaagtcatatgtcccaaagtcgatttcatgaaacacgttactcatgaaacgataataatcgtaactaataataggacacacttttcctactttcaacttattccaattacaaacctaaccagaatttttttttacttaaaaacagaacaataacttaactagttaacaatctaataaattactaaacactctaattactaattattaattacaaaccttacttaattacgaaaaacaagaaatataaataataaaacaagtcaagtacataataggtttataccactgactcgccggcgtcaaactccggcaatgaaactccggtggcctttgctcgccacacagccacactcgaggccctcttcggttcgctggcgcgcacagcagcgacgcacccccttcgctcgctcgctcgcgcacaacaacacacacacacgacccacgcgaccctcgtcgcagcacggtttcgcacgacaccctcgaacaccgcgaccctcgtcgcaacaccgaaccacacacacgccgcacgaaaatctcgacacacccgcacgaaccttcgacccttcgcaccgaaatcgcacgatccttcgcgcacaaacctcgagcaaaaccctcgacaatcctcgcacgatctctcgaccctcctcctgcgcgcaccctccgcgcgctcgaaccacagcctccttcgcacccctcgacgatctccgagaaagaacacggcgagggagacgaagggaatgaagagaacagtgagagagagggaaaaaatctgagggagagagagatccgagagagagagagagaaaattctgagagagagagagaaaggaaggtcggccaaggagagagagagggagaagaaaggtcggctgaggagagggagaagaaagggtctagggttttctgaaattccctccttttttttttatacccccttcaaaaggtagtaaccctaggtcaagtgaagattaggttactcttttaaaactccgaaaatgtctaacaatttcagattaataataatttattcctattaatttgtaaataaattaaaatacctttttattaattctttatattttcataattagtacgaaattgctactaaaaatacggagtattacaaccattatgcatcatatttccattttcccgattcctattactatagataccaagttggacgcaatgattgctagattcttttggaaaaataattctcaagtcgagattcattggaaaaggaaggaagttttacatcaacctcgaggtcaaggcggccttggtatccgtaatattggtatgtttaataaagctctactcatgaaacaagtatggcgcattgtccaacaccctcaattgttgttatctaaggtctttcagtcgtcgaaccagcataaaacctggattcgttcgtcgaactacagaatttcgttgggccgtcgcggtcttcttatggctagcaagactttgcaagagacatgtgcttggaaagtgggtaacggctcagacattagagctgcaacgcaaccatgggttggtggaaaaattcctacttttagagatgtggtaacactacaaaccacgacaaatactatggtcgcggaccttattctccctcataatcaaggctggaacgttcgtctccttcataaccttttcacaccgtctgatgttcgcttgattcgaggtatggaacttccttctcagttggatattagggacaaatactattggcctctagttagttctggaaattacactacaaagtcgggttatggttttcttttacaacaacaacaacaacgagaaaattacagcatgacaacccctaagaattcgaaattttttcgtcaactatggggattgaacatcatgcctaaatggaaaatgtttgtctggaaattgtggcataactgtttggccacgtcttccaacctccatcatcgaggtatcagggacattcatcactgcaggatatgtttacatgagattgaggatgaccagcatttattcaggttttgtcctcttgctttggaagcttgggaggggagcgatctcccaattcggccatcagatcacccccttagatcgttggcagagtggcttgagttctggtttggaaaatttcttaaggaagacggttatcagagtactcaggtgccagttttcctaggtaccttgtgggcaatctggatgactaggaatgatcaagtgtttcgccaggttagagcaactttagagcttctcaaagtttatgctacggaaagcaaaaatcaacatgctagattcattgtggaggagactccgacaaggccgcctccgatcccccagcccccaactatggtcatccgccgggcttcatcatagcaaatcttgggcaacatcagctggttaccccgaacatgacaattcagatagacggatcgtgggatagatctactggaaacggtggccttgtttgggttgcgatgcaggcaatggtccctgtttcgcttcannnnnnnnnnnnnnnnnnnnnnnnnnnnnnnnnnnnnnnnnnnnnnnnnnnnnnnnnnnnnnnnnnnnnnnnnnnnnnnnnnnnnnnnnnnnnnnnnnnnagggacaagtatatatgcgtcctcggctcttcaaacagaggttatggcatgcctctcggcacttcggtgggctagctctatcagtgctaccagtattatgatcattacggattcagaacttcttgttcgatacctgtcaaatcaactatctccagacatctccatatgtcatactatgcaggatattcgagctatctcagctacttttgtttgttgtcatattatgaaagtaggtagagatcaagttcaccaggctcatatgatcgcttgccgttgtcgtatccagaggtttaatgtagagtaatttatttctgtacgctaatttgatgtcaaaaaaaaaaataaaaaaaaaataaaagttgtgattaatatggtctaaaactgcttaagaatacaacctattgcatataactagtacattagattcacatagacaaagtcacataatgtctcttctcaagacatcacaattcaatacaactaattctaaattttcaaattttaatgctaaataagtttctctaaccctgcatctcaaagactcgacacctaatttagaacttttgatcattgtccaaattctttttgtacctctagtaacttaaataaaatattcaatttggctaccagtaaggatgaggagctagcttatgtggtagagcactctcctctgatctctgaggccaggggttcgatcctttcccccaacattatgttgggatatttccttagcatgctttgcatgccttaccagccaatgtgctggtagttcctacaaggctagtagccttggtaggggttagcccttgagctgacttaattttcatcttgtatggccgtcattgactttcgaatttccgtatccagttctccatgctcaatgcctaatgtctcaaattagtctctagtttattcaacttgccactatgaatcactatcacatgattaacttctttcaactaaaccaataaacttcaaatccaaaacacacactaccaaatcacaatttcacttcatcaagtaatatctcaaatttctaaatttaaattcacttcatctgattcctagacagttcctctttcgtcctctttgcatattcctattgccttaattaggtcatgttcctctataaaagtattctccttcttttgaacgtagtaagcatagttactctagttaatcatctacaatatcataatttacctcaaatccaatcggaacttttagaattattttatgaccataaaatcacatattcatctactacttaatttaaagtaagctctcatttagaatctaattttgttggtcattattccaacatccatagaaaattttagacatacaataggctatgggtgtaggattaccatcatactccacgtttctacaaacttcaatttaatcatttatatttatattatttacaatattaagaaaatacttttacttcctcatgaacacaactcatgccattacacatcctattttcatttaacattcatgttaagtccaccatttactttatcatctccaaccccgcacttataaccacaactcacctaatacacttatcatgcatttcaagctccacaaatgaacatattcacgttttctatcatatacacacatactcggcacccacacaatattcacacgacacacatagacaacacacactcacatctctcaatcttacgctttccgtcataaatttcaattcatccataataaaaggtacataactagctccatacatgacacttctaaccactatttatgtcattccaacatctttagttcactattctatacttctttattcatattctacctcccgaatttataatttcattgtcacatctcactttattcaacttacacatattacatgcattatctaataacacacacctttacgtcatacacatatgcacattcacatttcacacattgcacctttttcataaaattacaaattctcacttcctatcctaattttttttcaaatttgcgatctttcaaatgttctttttttttaaaaaaaaaactttggctctgataccaaattcacggtttgggcgggctggtcacggattgaaaaatcttggcccacactagtctgttaacgattttcacggtactggcggttcgtgagcctagcgggtggatcgcgctgacggttcaacatgagaattttttatttatttttcaaaattatgaaattattgattattgttacataaaacctctaaaattaattaaaaagtaaatataattattaatattaatgaataatttcattatttttgaatttgatttaattataatactaatttgattaaaatatatacactttgattaaaacatacataatttgtttaaataattacatgggatgggttgatccgattcaaaggtcgggctggaccgatatcatggaccgagttggacgattttagtagtaggcttttgtgtgttgggctaaaaaaaattgtgcccataacctatgcaccaatttcatgattcgaggtagactgaacctggctttatatgggctcgaaccacccgacttacaagatgagccgggttgaattgaccgcattgttggcgatctctggtgactagtaggctctaactaacattgaactgaggcagaattctactttatctcctctttctcggtaggataaaatgaaccaaggaattctgcaatggaatccctcttctccaaacacacagtctctctcctcatccttgctctcatccatcccatttatccccaaattcaaacgcttcacactaatctcagcaaccataaaatctgttgaagaagaaaaggaagaaaaattacccgcaagagagagaagaaagctccgaaatgagaggagagagagcaaaagttacaactggaaagaagaagtagagatgaaactcatcaaaaagcccaagaaaagatatgcttcttggactgaagagctcaatcttgatacattggcccaattgggccctcaatggtgggttgctcgggtttctcgggtcaatagtcaagagactggtgaacgtcttgctcgttctcttgctaacaattatccagacattgattttaaggtatgattttgaagattatgaagcaaatttcacatttttatgttattttggctttgggtttgtgaaaatttcaagctttttttgctgggtttgatgttgcaatttttttatgatatgtttgtatgtaaaatgatgatgagatttgggaaactagagctgttttcatctacaagggagtgaactgcgaaaggggaaagtttgggtagattttgtttctttggttattttattggacattatgacaaggttagctttgcctaatttcaataggggtggaacaaagattggaactttgttgaaatcacacaacaacctgcaatcaatttttgtatgcaacatttgtaagaacatgtcattttttggatttcttatacaacatttgccatttatcatacaatataagtattttattaaacagtatcaagtttttccaaccagattggaactaggaatttctccaaggttatgcaacttttattattgctattaatcaagtgaaagaaatgtcatatttcttatcaatgtcttatgagatggttacttatgaaatttagggggtgtttggtatcattaaaggaaatggaatggaaaggatttggataagtaggggaaatggaaataataattgttacctttaatagttgtttggtatcctagtggaatggaaacgattgagaggtttatgattgaggaaggaaacgtgatttgtttccactagtttgataagggtaacaaatggggggattgtatttccctcgggaaacggtatttgttacttaacactcataccaaacaattagaaatagaaaagcttatttgaatacgtttcctacatcaagtttttctataccaaacaccctcttagtatgttaacagaagtgatcgaacttggaatctgattgggttatatgcaatgtgaaatttgtgacatgggaattggaaagtactagatacgaagcgcggttgtgaattgcctagccattttcacctattgtgtatcattgcagaatcttcaacgacctgttttgctttgaagtattgtagagatttaccgggttgtttactgatgggaagctcctggagtattcacttgtttccttggcattttaaaatggcagccttgtttcttgtgattatcttcacacagttccataagcaacattaaaaaaacatttagcttactggaagctgacagttgcaatccaaagtgcattgcagcgagtatagactaggctcctgcatgcacttaattcctgccccgttaagtttcacatctggaagtttgattgaaggtttgctgttaacagtcttcctttaggtaggtgtcctatggattcgagttatatggaggtattcttaacatgccgtcttaagctttattcttcctcaacttctagaagttagcatcagaaagtagattttcagataagttattctaagggttaacacgttctgataggcgataataattatgtttacataagggccagttagataaataaggaaattaagtttagatataggttcttaaagttaaaagaacgtaacctgagtttacaactctctttctgtgtaaatgaacatcaatatcaataaattagagttgaacttgggtacttgatgtagaaggttctgtgtctgtggtaaagtacaatgaagagtgatgtggaatattttaattctttctaacagttcttatttctattttagctttatatgcctgcagtacaagagaaaagaaagttgaagaatggttcttattccatcaagtcaaaaccactgtttcctggatgcgtctttttgagatgtgtgctgaacaaggagctgcatgacttcattagagaagctgatggcataggtgcatttgttggatccaaagtcggaaacacgtaagctatttgcaccgccttgtctgcttgatgacagcgtaagctttttgcaaaaaattaagtgaatctttctctgatgtagtgctgctgttctctttcttcagaaattggttttggtatatgttggcttctcaaaacttgaaggagtgacgagaaagccactcattgtcttcaagttccatgtaaacttacttgaaccattgtacaagaaatcactcattgttgcacaccactcatctaaattatcttcaagtgtttgtgctttgtttccagcatttatgagttatgagcagttacaatcataagatacatgctaccacatttaataaagttgatgaactgatgtattatgatcatgtttttcgtgctagaaacctaggaaaatcccaaactatgttgaagtatattagttatgccttggctgtctgctacttgattttccaactgtaaaatgtggtggatttattaaccaaaacacattactcgaataatgaagacaatttcacctagatgttgagtggtcaaatggaacttagttggtttagtaaaatgctcctgcccactcactcaaacaaataagcaaagaaggaattacagaaaaacagatagcagaatagttgattgattttgaagataacctctgagctttcgagaggcgcagtccctacagatacatgatgttcctaagtaaataaatctaaacttaaccaggtttaactagagttattaagccgctctaattgaacccttctttcaaagtgttaaaagttcaacttctatgcctaaaacataggggaaacattttttcttgtgcacatgcttgaatagcttcattgaaatgtatcgtgtattcgtaacaaagcaactttggtaaattttgcatcgttttttccttgctgaatgagaggctcctatgtttttttcctggctaggtatttactgggtacatgtccagacaccagtggagttgaatttgttacaccattttttcaggaaaaaacagattaacaaacccagaccagtatctgaagatgatatggaaaaaatattccgacaagcaaaagaggagcaggagaaagctgatctagccttccaagaagaggagaaactagtgattcgtcagtctgagatgggtgatctcgaaacactacttgatacaagtccaaaaagccgaagaaataagattccagtatctgccccaaaagaaagaaagaaaaagcttgccaaagttggttcaacgattagagttgtttctgggtcctttgcagagttttcaggcattctcaagaaggtggatcaaaagaatgggatggtatgattttttgactttgcactactatttggttaatatgggaagtagaatttcctagaaagtggaagaatgtaaagttgtttggttgtgtctagaatataaagttggctattggtaagtaaaactttccatggaaattttgcttcccgtgatcaataaaacgactttatgcacttataaaactccattcggaaaacaacttagtaggaaatgttattttctatgatcaataaaatgaccacttaatgttgttttcattaatctttttggacctaaccatatctaaaagaatgccctattttgccgcaggtgacggtcggatttacactatttggcaaggagaccatagctgacttagacatcaacgcaattgtagaagaagcggagtaaatggcgagtgtatttcaagttcaaccttcaatcggtccgtcccgaggctttctcatgtagtataaagtttgtggacttttgttattgtttgtcatgtttagattgttgaatgtacattacgagtgtaaatgtgaatagacactatgtaacgttaagaagcaaaagtctctcatacaattcatattctcttttacgaggttaacctctattggctagaagtacaactttctacgttggttatgaactcctttttttttttttttttttgacggggtggttatgaactccttgccaatggcccaaaacaggcaatactcttactaaagtaactcgagtggtgctccttttccctaatcaaccatcttaatcttttttaggtgagcgtgtctttctttcttgagaactaccacatatctctattatataagggaagggcgagcaggaacgttgcttattagtggaagattgcggcaggaacgttgcttcctcatgagataatatcgtcattaaatgatgatgaaaatggtggtgaagttgccgagcttcaaggaagataatggtggatgatttaactaggaaagggaagttaaataatagtatggcaatttgacgtctctggctctatgattggggatccaatggaagtttctggctctatgaattgaatttagagttggtaagttgtcaatagtcgttaattgtgtgaattttgaagagttatgttttgtgtgtatattgttagtgaactacaatttgtgtgaggctttattacgggttttctgaatttttaattgtgtaaattgttagtgaattatgatttttctgaattgtttgtgatttttttacagaaattgttagtgaattttaatgtgtgggttattagcgaattatttttgatgggtataaatttagtgttgttgattttgtttttagatgtaaaaaacttgatgctattctaaatcgattccaaaatcttagaacttattgtgaataatggtaatattcttctatttaagtaaaatttcatatgattgtaagtcggttccaaaattttagaatcgtagtgaacaattgtagtttacttttattgaagtagttgtatatggattttgtaacgttttgtatttagcagttatgatttgtttactttttcatatttagtaacgtgcaattgcgctacccctcatcagaacttttggatccgcccctgaataagagagagtagaaaggaggcaaggaggagagaggaaagggaacaccacttgaattagggcttgttcactgctacacactttccctttccctttccctttctttgctctttctctcttttttcaaagagaactcaattttttttcaagaaaacaggggtagcagatgctaccccttgtgacttagtggctccgccaccgactatattaggatttccgcaaagatcacaataggagaaaccgcatatgacaacagcacgatccagcactataataccccccccccccccctccaggtttcgttccttgaaacaatattttcagactattgttgttttatcctgacaatttaagaaagcatattttgtactacctccggtctttattagtttacccgtattcatttttgggacttcccttattagtttacccatttattttgtttctatttttggaatgtgaccactaactttgcatcacacatacattcaactttaacataaaataatagtttatctttctttctatgtcccccaacattatttctcctaaaattttgtgcaaaaaaaatgggtaaattaataaacaccggaaggagtattatataaggtgtacttatcatactattcaagataaactttctcattatctctatcagaaactcctccaacttgagaaatggttaatattggagtacatcgaagtctatagttcatcgactgattctcatttcaagcctacgccttgtttggtacgcggagtaggatcatattacccatctcttaaaacaatactagctttctaaacacgcgatgcgtacaagaacattcttttcatgcgacaacaattttttcattgtggagtctatggggcgataacaattttttcattgtggagtctatttttttacttttttagtggagtctattttttttacttttttaatcccaaatttgattcaaatttatgttcaccataattgcaaatattatttttaatctttgtgctttttttttgtcttctttttaattttgatttatatgtgaacgatttccaattctaactcttattatctatcaccaatcgtatagctaaaacttcaaatgtagtacgttgtcttgatctgaccttattatcctatatataattgactaacagaaattgaaattatataaacccattactattatcatttctttacatgactacaatgttgtggaagtataacactgattttttattttgacaagttttctagtttactggaagattttaatatttataaatgaatttgttatctttgttcttttaaaactttttcagtctttcctttttttaacctaaaattttaagttattgtaattctagtttttaaaaatggcaaatattttaattgattgataacccatctataaaacccaagacaaacaaatgccatgctgtcacatgatgtgttccaaaaatcgaactcatgacctttcatttgatatgctaatgcactaagcaactacactacatcgctcatgttggtctttgtggggtaaaaaatcattgaaagacaaatatttctgtttttaaacacttcaaatacacaccagtaaataatattatcttaaaaatttaaacaaaattgatgtttaaggatattatagtcatttaatagggggacactatgccttcccttcacttatataatagagattttcatgtgatctgtcgaaattcaaaggatggaggaaaagggtaggagatgatcgtatttatatattgaagacattgaggatatgtgcaaattaataggtgcacacgtacatatgatgagtaaggtacgcacgaatgaacatcaagcactaagttatgcacataaataccaataccaatgaacatatactaatagagttgtacatatgttcatttgacttgttagtcatgtacatgtgtttatttgacttaatattcatgtacacttggcctgttagccatatacatgtgttcatttgacttgttattcatgtacatttgactagttagccatgtacatgtatggaccttactcgccatacggacatgtgcacgatctaatgggattgcccggagctgacgtgtattccgcagtccgaaggtggaagaagtagacttgaaaaaatttaataaaagactgcaaataatagaaactacagaaagggatgagaaagtacgagatgttgctccctcatctgcatcctgtaattacattagcaatccttctatgtcttggtcttcttttcctggaaattcgaccagcagtagtagtatttccattctcaattttaagggtgacaatagacaacatggaatggttaaatttgcagcccatagaggctttcgagtgtcttcaaatcctggagatacgctacaacaagaaggtggagagcttgagagaagttggctattgagcatgtcagagaggaagcatctgtttgccttgggaggggttgattttacatagttgtggtaatctgatgctatcagacgaagaacaagaagacagagaagttgatattggcaatggcctcatgtcattcccgtcccttcatcactccctccataccttgaaattgagttctcttccacagctggtgaagctacccaactggatgcagttctaccgctctccaaatccttcaaattcaagattgtacagcactggaatcaatgccgaaatggatgccctaactaacatcactcaaaaaaacatagtgttttccagtgttctgaacagctgaagagaagatgccaaaaagaaaccccctccccccggactggccctatattcgacacatctcagacattgtatttgaacactgcggctgagagattaacccccatcccccgaacctcctcctctcttagtctcttttcattgattttgtcaaaaactaaacgtgttacgcagtaggaacgatttacctctcttccaaaacaacaaagtgaaagtttctccatttaatccatcatcgatgttaagtagtaaaatctgaatttgctgttcttccagtcttcaccaactcacctacaatttgtaacagttattcatcctggtggaaatcgagattcatccccacaaagctatcttttacaggcatgcagcttataaaagcagtagattgctgaacttcaaagaagcaacaaaaatcacattttcagaaaaagaaggttacaggatcacaatattgtatatacggggaaactaatatatggaagtatgtacaactagcgagtttgtaagcatcaataagtcgaccatatgtgaaacccatcttgaaattgttcagaagggcaacgggaaatgttaccttagatcatgcatttacacatgggttgaaaaagtaccttatgcattctttgtaattctaactattggaaagaaatatactcttactattgaagatgtgtacacttatgtgtacacctaggcaccaagatatttctttctcttaaaatatcttttttagttttctgttcctagtattttgtactgatccctaggtggattctagttgttattttgtcttttctgtttcttgtctttatgtacagcttgcttagtcaccctaggttagcaagctttctgatatgaaaaggtagaggaggtaggattctaggcgcagctttgtaagaagaaaagctccatttttccttgaaggaatatatatcaaaaactactggaaaactgattttccagattaaaaggaaagttagagtcactgattcttttcacttacgttgtattacattctctgaatcattattcttttgagtttcttgaaagacgagcagtcaagcattaccttattgtttcaatcatcagactagaataatcaatattgcctttcaacaccaacatatggatgcttcaccctcaagcatttgtgttcgtttctcatcttacactaccttgcctaaattgcaatgcaagatctttgcacagaacagggtgatagaccttgagatgtcaatggagcagtataaagtcttttataagacgacataactgttagttaaaccaaaaatagatgtgttgagtcacagaataccaaattcagcacatctgatcaatctttaactttgcttagaccatttacgaaatttagcattatcggcccatttggttagtggtcatacatggtggtaatggcaatgtaatatagtgcaaatttgtaaacaaattctaatatctatacccatggtaatgaaatttcatcataaacatgagttttcctttataaattttcattaccacccgatttccaagtggtgatggatgatggtaatgaaactttaggaagaaaaaggaattcggtggatgagagagcatttccatacccgatttccaagtggtgatggatgatggtaatgaaactttaggaagaaaaaggaattcggtggatgagagagcatttccatgggtaacatgggtttttcattttcttcacaaatttatactacaaaacattgccattaccactacttatgaccactaaacaaacgagccgatagtcttcagagaaagtgaattgcatattacagatggacaaaacaactgtatacaagctttacaacggtcgttcctgtagatgggatgtaaattcatccccagaaagcaaacttttacaggcatgaagcttacaaaagcagtggattgctgaagtttagctaaagcaagtaggaatcaactttaaagaagcaacaaaaatcatatattcaaaaagagaatgttacaggatcacaacattgtatataggggggttctaatatctagaggtatgtacaacaaagtattatcgacaccaaggtcaactagcaagtttgaaagcatcaataaatagaccatatgtgaaacccatcttgaagttgttgagaagagcaatgggaaatgtcaccttagatcgactatagtaaaatttggttgcatattcagtaaggagcacacacaagaccgcagcaataacatcattgacacctaaagctccaaaggacaaagaaattgtttgtgccacataaaatccacctaacaaggcaattcccccaaagagcgcccttcgagaaggtttcttgaaatagttgtttgatatatttggtatagtccgaatgatgtctaccagtcttctaggtcccacattatcttgcacagctcggataggaccgaactgaactgaagatgtcgaaacaagagaatcagatcttccatatgagatcttgtaattaggacttaaaccgtaattaaggagcccaatatggctcaaacccactgcattcgccatggagttgagggaaaattgttccctgcatgaatagctagctatgttatgccaaagagctaaacacagtacaccactacacatgatgttgtttctcatctttccatcattagttcactattaaaagcatgctgcaaaagagacaaccaattcctctagaagttactgctattgcagtagtagccaccgagccacgtcttgcaaatattttgaaaattgggagaagcagatgcatgatttgaagcctgaacgggatgctcaaacatcaagcattcaagccagtccatgcttaggtttataatgcacacatactttgaatatttgggaatcagcaaaacatcacgaagaaaaaataaaattcagcagagtatcagataatcctcctgctgacctgcataaccctatatagccctgagtactgcaaagaaaatcacaaaagtaaatttgcactcaggtttctcatttcctgtcccttgcttttgcccctcgctatctcatggtcgtggggcagggaggttaaaacgaagtcaattagtatggatttgaaaaccaccgcaccacaccatctctaaagctatgcaacataacgtaagtaacagtttaaatgttttacaagagtatttgaaagaaaaaaggatttgtaacatgagtgatggattcggatttccttatttgaacaaaagcacctaacctcaaggaaataccctgtttagctagaagtacaatattttcataattacaacaatgtacaattatatactatctgatagagagatcaactaatcttgatagcagcaataggtgccacaagtcatccgataatgatatatagtactaaaattcttcaatgaactaagagtaagagatcaacagagaaaatacattcttagcaagggatatactccctctatttttttaactaataatctacaaagcacacaaaacctttgttcccccggtttcgaaaagttcctcaaatctctcagcttttgcatcttccaaaaccaacaattataaccagcgaaacaagaacattgtaataaagatgaaatatgatcgatcatcagaaagataacaaatttggaatgcacattgaacaatctccaagtaaagtttgaaaacaatttgttaaccgattattcagaattcattcaaattgatactacgaaaactgaaattgaaattcacaacaaaaaatttgaaaccctaatgcgcaaatgtcactcgacattggccaaattaaccaacaattatttgccactccacctttaaaattataccagcaacaaagtaatcgcgaaatcaaaaaccgaagcttcaaaaggatagagaaattgagcaatgaaagtagatcataagatagttctaagagactaaaactaatagtcttttgaacgaagaaacaaagtactaagtactaactttggcaggaaaggtaggcgaagaaagagcaagtcagcttaactcttctggatttgctcttcatattctttttctattaaattatattaatgtcctcgtacatgacattgctctctggtttttttttattattattattattattctcacttaaaattttgacactatttatatttaaagagaattttttaaatttataagaaaaatatatagtcgtgtggggtcttgtttgattcatctcaaatattactttattaatattccgtcgttatgaattgaatctccctctctctctttttctctctaaaaccctagcctcccctactccttcttcatcagttaggggctgccatgaatactttcatccatggtaagccccctttttccttttattttcagcttttagtttattttcttgttttgttgaataaattagtatctctttatgagatttcttcaaaccttgttatggggtttttagtctatgttgtggagatctccttctcccctatgggagttgtgagtgtggttgttttgtttttaggtatgagaaattgttcttattggttgaagttcaaaactcaacatgaaggtattggaatttcggatgcggttaacatggctcgatcaagaatgttcttcccaaactatgtcgagaatgatagacttcctcatcaatagttgtttgattcagagatacaagggggtcacgttgtattgctcgatctggttcattatagtttcttcgaagacgaatttgatttaaccttgtttaattgtatcttgtttttctttaatatctattgtagatgccgtttggccttcaattgaaaaaaaaaaaatattccgtcgttataatttttactaatacataataaaagatatttaagttcaacgatgtgcattgggagacgcgcaccagaaagtgaggaagataaaaaaaaaaaacagagagagtacaatatatcccaaatcgctcccaatctcctttcataatattgagttattgactatgaatctatgattactgaagaatcttctcatggcctatgaatggaacggtgaaagtctagaagatgaaaaagcttaccacccttccacttccatcttcctcattctcccctccaaattctaacaagactatttttccctctttggcgtgggtacaaattaggggtgaaagttcggtgtacggtttggattaaggactaatcaagtccgattcgaacaaaatttggatgttaattttccaatccgaatccaaaccaattaaagtttgaatccgatccaatccaaattttcatactctaaattgggtccgattcaaaaattcatttttttaaaacttataaattaagcacaacagcaggctagtagatttaggaaatgaggaatttagtgttaggattgtaggggaagggttgaagtgctacgcctactggggtatggactaagctttattttataaaaaagaatctagttaagcacttaaatccaatccacatacacaatacaagtcatattactatttggttatattggatttttggatctaattaccctcaatccaatccgatccgaaaatccatttttttcaaaaaaaaatcaatccgaacacagttcgaatccgatttggattactaattcggattggattaactttcaccatgatacatattacgatcttgttaggtcaaaataagtttagcaaaaaaaaatcgagttgttaggtgttagtagtcaatatagtttttagaataatttatgttgggtatgtatactaatagtactaattagtgatttgattagtaaaagaagggttttgctaaacaacgccctagaatttcctagtaacaccctaagtacggtatttttataccgtatttacatacttgtatatctttctctctcctccccttgactcgctttcctaatatattctcattttcaaattttctccccttcttcattcactttccctcccatcttcttccactcaccactagacatcggtgccgcctcacaaccaccgccggaccaccaccaccgcactgctacccccgtcacaccaccaccgcatacctccaccatcaccccctcctctgttttttttcatttacagtgaatttttttataaaaaaaattaagggaggcgtccaccatggacgccccaccaccgggaggcgcctgccatggacgcctcccttaatttattttaaaaaaatttaaaaaaaaaggaggatcagcacgtctcgaacccgaaacattgagaatgtttaaatgtcgactgaaacgctgccatgatgactcagctgctgttatgttgaactcaatctcatacttctttatatttgtcggtctgtatgcaaagttgggttcaggaatcggagaaggaataacctggacataacccaactgtcgtagtacccgatctgtgttgtacggctcaacaatatctcggtagcgtatgcaactgacatataacgttgtcggcaccgtcctagccgatcatccccgtacgacgtccaaatgacctgaaaaatagaaaacgtgaattaatttgattagtttaatttacaactaatatcgactacattaataaaagaataaattgcgtacctctgaagcctcaagggtgtccaaccgtctgcgtatcgactggagtcgaataagatccttgctgacaatgtgatgatcccactttctagaccggggattgtgatcagacaccgctaaactatctctctgaggccgaaaacatgggaagtactcatatatctaaacctgtaaaagtgtgagacacctagcaatctatttggccgactgcctagtcgccacccctaactgacgatatagaaaagccaaagtcgttgatccccatgaatacctatgtactgactcaaggtcatccaactcaataatgttctagggcgagagccgggtactactcttatcagtgaacaacgtacatccaagtatgatgagcagaaaagcgcgaatcttcacatcagcgggatgaccaccacaaccgcatctgtcaaagatctcgctaacactaacgccaccgttcttccaaatgggtgctggctgagtactgaaataactcatcacgagtaacctggagtagctcctcaaagcgaacgtacaaatcatcagatgacaaagcaccacccactgtgcgaccatcaataggatctcgtataatttgccaaacgtcatgcaacatgatcgtcatctacttgaaaggcaagtgaaacgtgttcgtgtcgggctgccaacgttctataagcgctgaaatcaatggaaagtcaaggtacgaacacataatgaacgggagatggctaatacaagaagcatgtacacgcaactgcggatcgaagtcccaactcttcaaactatcaaccacactagcacgattatgacacatcatcactgtataagtaaacggatcatcgtagatacgtgcgctgatgtgagtcgataactaggaatcacgctaccatagggcccccaggcatagactccctaactaatcagcaagtgtcactagcagctctggtcctgctcgaagtccgaatacgtgcgtaacctgacgattatgaaacaaacctccatcctctaccattcctcacagtcacacggagagtgacatcctctgcaccaccagtcaaagaattttccaactcctcatcctcgatttcccaacccggattataaggtgcatcccttggaataggatccggcctaacccgctcttctgccctcaccctcctactcaatgcattgataccacaagattgagtatgtcgtgagtcgtgacccaaatccctcaagacccatactatcgccgtctaaagccctcgactgagcctaataatcattttttttaattagtcactatttaatcaatttaaactatttaattcaatatctacataccttcgtcgttattttaatattaacattaatataagtaaattgtcgcataacatggtaatttcattaaatattataaaatattaacatactatatttaatgaatataattacaaattataacatgctattaatattttttttaaaacattattatgttacaaattattataaaaattataacatgctaattaacatattaatataactaaacaaacacgtacaaaaacattcgaaatttaaaaaaaaaacaatcatggaaacgaatttttttttggttaaatttcatttcctcgatgaacaaggaaacgaaacggcgagatggcggcgttggtggaatttcccggcgaaacgcagcttcctttcgaattcgattcatagttgccataagtttgcattttacccagatttcaaataaattttactaattcgctcaaattgctcatgaaattgtttatttccgcacattttttaattaacccctccagaatttgattcgtaaatatggcgaagctattgagtacaaatcttctggcatcaatggcggtgttgccgttcatcattttaacatcaatggaggtaagagtcatgttttttcaacaatataaaacttatatgatttttctgtttttccccgtatcttgtttgagattgtgattattaagagagtcaagtctcacaatattcgaaagtctacgtaatccacctcaaattgacgaagaaaacaagcaggaaaggattaagtaagttcgtggaaccattagaattaattttcaaatatagctctacctaatatatggcctacttttaattttaaataagaagaaggtaatgtgattagaaacaaattggtcttaaattattcattaagcttaataatgcataaactttatcaagtgctatcttcttttcagggccgtcttgaagatttttgggcccagttctattatgaaaattgagcccctaaatttatacaaaataaagatggaaggttagagttctaaagatagaaagttgaaaatctaaatataaatcattgacaaatttattaagggtgagaaacaagggtgttttcttcaaatatgaagcaaaattttcaaaataatataattttgggccttcttttgatacaatttttcagcgacatgattgtcgattgatgcttatattattgtatactcgatccatattgtttaagatgaattgtttgtctttgatggtctccaatgcatattttgtatacttaggaattctaattatgtactattagtagacattgagatgaatacagaatcgccataatgaagtatgattattttagttatatactttctccgttccaaatatataaatgtaacacttgtgtactttatgcgtactaatgcataacaacgtgcactctcctgtgtttaattatatactttttgagagaagtgttacattggggaccatgggactgtgtataatttgaccgcaaaatcgaagtgtcgcatttgattgaaaatggagagagtagtatatagatggaacactgctggtcatctttggccaacaaaccaaaaattgatattaatcccttattcaggtcttttcatctttttgacacaaaatggatgttgtaggcactgcgctatctgctgcccaatctctgtttgcagccctgcaaagttctgagctcaaagagatcctctcgatctttggctacaaatcccaacttgatgacctccaacgcactgtctctaccatcaacgctgtattccgtgatgctgagaccaaacaggagctcactcatgaagcacaacattggctcgaggaactcaaggatgctgtctttgaagcagatgatctgttcgacgagtttgtcactcttgccgagcagaagcaacttgtagaggctggtggcagtctttccaaaaagatgcgccaattcttttctgattccaacccccttggcatcgcttataggatgtcacgaggggttaagaagatcaagaagaagttggatgctatcgcttacaatcatcaatttagctttaagattgatcttgagcctataaaagagagaaggctcgagactggttctgtcgtgaacgcaggtgatatcattggaagagaggatgacttggagaagatcgtaggtttgttgcttgattctaacatccagcgtgatgtgtctttccttacgatagtgggaatgggagggttgggtaaaactgctcttgcccaactcgtgtacaatgatccaagggtcagaactgcttttccattgagatgttggaattgtgtctctgatcaagatcaaaagaaactagatgtgaaagaaattttgggtaagattctgtctacagctactggtaagaatcacgagggttcaaccatggatcatgtgcaaacccaactacgggaacaactatgtggcaagagatacttgcttgttttggatgatgtatggaatgagaatcctaatcaattgcgttatctggtagaattcttcatgggaggtcaaaggggaaattggattgtggtaactacgcgttcgcacgagacagcgagaattataagagatggtccattgcacaagctgcaaggtttgtctgaggaaaactcttggcgtttatttgtaaggtggaccttcggatcagtgcaaccaaaattccctaatgactttgtcatgattgcacgagatatagttgacaaatgtgctcgaaaccctttggctataagagtggtaggaagtcttttgtgtggtcaagacaagagtaagtggctttcatttcatgagatctgtttagccaacattagaaagagtcataatgatatcatgccaatactgaacctaagttaccatcatcttgaacctccaatcaggagatgctttagttattgtgcaatgtttccaaaggatttccttatagggaagaagacgttgataaacctttggatggcacaaggttatattgttccattagacaaagatcaaagcatagatgatgctagtgaggaatacatatcaattttgctgcagagatgttttttcgaaaacatcggaacagaaaaagattatgttattaagatacatgatctcatgcatgatattgctcaaaatgtcatggggaaggagctttgtacgacaaaaaacattagtggcagcttggataaaaatgttcgccatctatctcttgccagaactagttttgcaagatactcttttaatgcaactcatattcgctcctatttctatgctggctactggtgtcaggatgctgagataaaccagttttcagttgaggcattagtaccaaactgtttgtgcctaagggcattggacctggcttggtcgaagataaaaagtgtaccagactcaattggtggattgttgcatttgaggtacttagatctttcatataacgaagatctggaagtacttccgaactcaattgccaaactatataatctgcaaaccttacaattgaagggttgcaagagattggaagggttaccaaaacatttgagcaggctggttaagcttcaaactttagatatatatggttgcaacaatgtaacttatatgcccaaaggcatgggtaagatgacttgccttcacactctcagtaagtttatagtgggtggagaagggagttgttcaagttggaagcaatggtttgatgggcaggaagatctaaaggctctcaacaacctaaagggtcatctggaaatccaaatcaggtggcccgaaaatactacagatgctgtcaaggaagatgttaagagggaaggattatacctgaatcataaggaacatctcaatcacattgtggttgatttcagatgtgaggagggtggtggaagaatggatgatgaggaagcaagaagattgatggaagagctgcggccacatccttatcttgaaaatttggctgtgaaagcatactatggtgcgaaaatgcctggttgggcaacccttctcccaaatcttacagagctttatctttctgattgtggggaatcggagtgccttccatgcatgggaaacttggattgtctgaaagttctccggctttcgcatttggcaaaattggagtatattgaagaagatagcacatcagctaatttcagttttaggcctggaccggaaagtgcaggactatcattatacttcccctcccttgaactccttgagttgaagcgtttgcacaagttaaaaggatggaggagaagggaagggttaggagatgatcaccagccttttaatgaaagcagcagcaatggtcccggtaattacattacctttctgctctataatctctggctcctcagatggttcagacttaagggcaaatgctcttccaggtgctttcgatactccttttgggttacgacccgagcttgattcaccggccgctttcggtagcaacacctcaccagtgcgcgattacctctagcattcccagattgatttaaaacgggacattcctttattctatgccccgtcttcatgcatttgaaacaaatgttttgcccctcacagtttttcccatagtgatcttttccataacgtcgacacttccactccttcttccccccttcccctgctttggtagggactaaggtcatagacgttccggctggatccgtcttaaatttcttgctactccctgctccagatttttcgttccccttcctctttctttttgagctttcatccttttgctcaatccgttcatgttctaaggctcgatcgtacaaatcctcaaagctgctataaacccctattcttttctggtacttcagatttaacccttcaaaaaattgcatggattttaccatttcgttgctagtaaagtctggagcgaaccgcgagagttccataaatttggcagcatattctactaccgtcatctgtccttgccttaagaacaagaattcattctcttttttccttcttaatgctggaggaaagaacttattcctcaacttttccacgaacatctccgaggtggaaatggcttgggtggtggttttcttaaccgtaccccaccacatatccgcagggccttccaggtaaaaggatgccaactttaccttcaagttctcaggacagtttaccacatccagcagcttttccatatatgcaatccagtcctcgaattttactgggatccgcttcagtcatagccccgtggcttatgagtagcaagcctcttatagaacttcccttcctcattatccctattttgttcctgcttttccaggattgccagcaatcgggtattcatttcccttagctgacgtatctgttcggcttgagaattttccagttgttcctgtggttcattagtttccacattctgctggatctcattggtcacgttgatgtgtgccataacctataaaatgataactgaatattcttagtagtccccaaaattttcaaatcattacatataagctactaaacacttattcccgaaaaggattgcaattttccactttacacatataagcacacatattcatatcatagatcattcaaaatatattataacttgaaaatcttacttcaaaatacaacacaatagttccattgcccgagtcaatcatctcatcccgacaattcttttatacatacaataaaaactaaggctaaccacctcttccttccacatcatcactatgctacttcctcctaaagaatgttatacggatcatatgcgtatccacttgtcatcgctcttggaggatggggttttgggaatgtagtcggggtcactcatccatgagttacttcctcgaaatactactcctagcacccccgagggcactcctgaatcatcacttgatcctctcgaattacgtgactggggatgagctatactcgtagcagaatctccaaatctttgaggttgaggtggtgccatactagcagcagagttagggggtgtaggaactcttccccctcttcttctttggtattctactgtggctattacatttgtacatatctctccaagatcttgagcattccgacccatatcttgcaaacccgccgcttgcttagcccgctccatctcctctaacacctcttcggtgttccttcccacccgatcgattcttatcaatattatccatcgcagtactatcattcaaattcagcaaagatggtgttgccataaacaaggttagcaatttccaataggtccaacgaaacaccacccatggatgaaatcatggtaaggtcttgatgagggtgtatgcttgaatagcgaggtcgagtgaaagggttatggtttctactcccatataactggttatactcttctatgacattgagtttctctctagcaaataccagaggatcctctccttcatttctcttaacatctggttcctcttggtaccttcgatttccattactaccaatcacccaatatgcgttgtttctccatattactcttgacccattaccattaccacttccacttgcagacatctaattgcacatacataacacataacttagatagcacacataagtatcaaacacataatctacacacattatttgcccttgaacataatccatcacattatttcaccactcgagtataacatgcttaaactaactaataacccaaatcagtttcaattgttttaaacataaatgttttagatgattgattgatcatgttcaaggaagctaagaaatgctatgatggtaagagtaacatgctcagtagggcaaataatgtgtgtagattatgtgtttgatacttatgtgtgctatttaagttatgtgttatgtatgtgcaattagatgtctgcaagtggaagtggtaatggtaatgggtcaagagtaatatggagaaacaacgcatattgggtgattggtagtgatggaaatcgaaggtaccaagaggaaccagatgttaagagaaatgaaggagaggatcctctcggtatttgctagagagaaactcaatgtcatagaagagtataaccagttatatgggagtggaaaccataaccctttcactcgactgctattcaagcatacaccctcatcaagaccttaccgcagctttcatccatgggtggtgtttcgttggacctattggaaattgctaaccttgtttatggcaacaccatctttgctgaatttgaatgatagtactgcgatggataatattgataagaatctgatcaggtgggaaggaacaccggaggaggtgttagaggagatggagcggctaagcaagcaaatgggtttgcaagatatgggtcggaatgctcaagatcggagagatatgtacaacagaatagccacaagagaataccaaagaagaagaggggaagagttcctacaccccctaactcgccgctagtatggcaccacctcaacctcaaagatttggagattctctcacgagtatagctcatccctaccacgtaattcgagaggatcaagtgatgattcagagtgccctggggtgctaggagtagtatttcgaggaagtaactcatggatgagtgaccccgactacattcccaaaaccccatcctccaagagcgatgacaaaggatacgcatatgatccgtataacattctttaggaggaagtagcatagtgatgatgtggaaggaagtggtggtagccttagtttttattgtatgtataaaagaattgtcgatgagatgattgacttcgggcaatggaactattgtgttgtattttgaagtaagattttcaagttataatatattttgaatgatctatgatatgaatatgtgtgcttatatgtgtaaagtggaaaattgcaatcctttctcgggaataagtgtttagtagcttatatgtaatgatttgaaaattttggggactactaagaatattcagttatcattttataggttatggcacacatcaacgtgaccaatgagatccagagaatgtggaaactaatgaaccacgagaacaactggaaaattctcaagccgaacagatacgccgcctaagggaaatgaatacccgattgcttgcaatcccgaaaaaaggaacaaaatagggataatgaggaagggaagttctataagaggcttgctactcataagccacgggctatgacggcgaagctgatccgtaaaattcgaggaccggattgcatatatggaaaagcgccggatgtggtaaactgtcctgagaacttgaaggtaaagctggcatccttttacctggaaggccctgcggatatgtggtggggtacggttaagaaaacctccacccaagccatttcaacctgggagatgttcgtggaaaagttgaggaataagttctttcctccaacattaagaaggaaaaaagagaatgaattcttgttcttaaggcaaggacagatgacgatagtagaatatgccacaaatttatggaactctcgcggttcgctccagactttactagcaacgaaaagggtaaaatccatgcgattttttgaagggttaaatcaagtaccgaaaagaataggggtttatagcagctttgaggatttgtatgatcgagccttagaacatgaacagattgagcaaaaggatgaaagctcaaaagaaagaggaaggggaacgaaaaatcggagcagggagtagcaagaaatttaagacggatccaaataacgtctatgaccttagtccctaccaaagcggggaagggggaagaaggagtggaagtgtcgacgttgtggaaaagatcactatgggaaaaactgtgaggggcaaaacatttgtttcaaatgcatgaagacggggcatagaatcaaggaatgttccgttttaaatcaatctgggaatgctagaggtaatcagcggcctggtgaggtgttgctactgaaagcggctggtgaatcaagctcgggtcgtaacccaaaaggagtatcgaaagcacctggaagagcatttgcccttaagtctgaaccatctgaggagccagagattatagagcagaaaggtaatgtaattaccgggacctttgatgtgtgtaatttacctgcatttgtattatttgattactgagcatcccactcttttatttcaaatgtatttgcattccgcatagagcaaaaacccaaagtgacttcatgtgatttgaatgtaactttgcacgataaaactaccttccgatgtaagtatatgctttgaaagaatgtggtattagaagctgcggaggtggatttgaaggcgatttgataatgtttaatttaggtgtgtatgatgtgattacgggtatggattggttgagtaaaaatcgagctataatagaatgttatactcgagtggtgaaacttcgacccttcttagagcggaccattacccatcagggctgggatggtgctatggaagcacacatttgtcaggtaacggaatgaggagaaactgaatcaaaattgatgaatataccggtaattcgagaatttcccgatgtatttccggaggatttaccgtgggttgcctccacatcgaagttacggattttcatatagatttgattccggagctaccccgatctcaagagctccgtataggatggcgccaaatgagatggtagaattaaagaagcaattagatgagttgttgcgaagggatatatcggacctagtgtgtctccatggggagcaccaggtgttgttcgttaagaaaaaggatggctccatgagattatgtatagattatcgagagatcaataagatcacggtgcggaataggtatcctttaccaagaattgatgatctatttgatcaccgaggggagcgagtgtattctccaagattaatttgaggtccggttatcacccggatgaggattgtagaggaggatataccaaagacaactttccgcactcgatacgggcattacgagtttttaattatgccatttggattgactaatgcgctgcgacttttatggatttaatgcaacgctattttaagccgttcttggatcgatttgtggttatctttatagatgatatcttgatatactcaagaaatcgtgaggaacatgaaggtcatctcgagaacctgtcctagctacactccgaaggaaaagttgtatgccaagcttagtaaatgtgatttttggttagaggaggtgaagtttctcggacatgtggtgtctaaggaaggcatctctgtggacccgacaagattaaggcggtagaagaatggccaagatcgaagaatgtgtcgaagttcggagttttacgggttttgcgttattattatcggcgatttgtgaagaatttctctaaaatagcattacccatcacaagtttaatcaggaaaaactcccgtttccaatggaatgaaaaatgtgaagccgccttcttagagttaaagcggaggtcaaccagtgctcctattctcgacccttccctccgaaccgaggggtttgaaatttatagtgatgcttctcgggaaggtttgggatgtgtgttgatgcagcatgggaaagtgatagcctatgcgtctcggcgattgcgacctcatgagaaaaattatccagtgcatgatttggaattagtcagcagttgtctttgctcgaagttatggcgacattatttgtacggagtttcatgtaaggtgttcacggatcataaaagtttgaagtatatcttcactcaaaaagatatgaacatgagacaaagaagatggttagagttgctcaaagattacgacatcgacattcaatatcatcccgaaaagcaaataaggtggcgagatgcacttagtagaaggccaaggagtgaattaagctttttatcgcaatgccgatgaactgagtaaagagatagagttatttgaactcgtttttgtacgcgttcgggaaattggaggaaccattaatgctttaactcgtccaacccgacctatactcgagagattcgggaaaagcaaatccaagatgcattcctgcagggtgtcaaagaaaagattaagaatggcgaaattcaggaatttgctcaatatgaagacggaagtattagactgaggggacgatggtgtcttcccgaggatcaggatttaagacagaggattttgaaggaagctcatagtagtccgtattcggtgcatctcggtagggacaaaatggtgcgagatcttaagaaatacttcggtggagaggcctcaagaaggatgtagcgagatatgtagcgagatgtttaacatgtcaaaaggtgaagtttgagcgccgaaggcactcgggttattgcaaccattacctattccgagaatggaaatgggattctgtctcaatggatttcgtgtctggggttaccaagatctaggaaaggaaatgactcaatttgggtaataatggatcgtctcacaaaaaagcgtgcgatttcttgcaataaaggggacttggaatcagtcgcagatggctgatgcttacgttcggaatattgttcgtcttcatggggtaccagtaagcattgtttcgaatagagacccccgatttctggctcatttctgggagaaacttcaggaagcttttggaacaacattgaaatttagtacaacatttcatcctgctaccgatggtcaaactgaacgtacaattcaggtattggaagatatgttgcgagcttgtgttttggaattccaagggtcttgggaagatcatttagctttgatagaattctcttataacaatagtcatcagaccacaatagaaaaaggctccatatgaagccctgtatggtcggaagtgccgaacgccgatttgttgggaagatttaaggaatagagtacctgtatacacaaggccaattacaattatgtcttcctcaattgaagtcattgagaatagaaagatgcccattgctgacatttatgccgctgtgtcccaagacagaaaaacggcatttagttgtatttaatgaacgactccggatagtgcatactaaaggagatgagaatttctatgctccattacattcatcatcatctgatcctgaaaacccgaggagcactattcccattcccatgttaagagaggtatacataaacaatgtggcatggctaaattcgctgcctatggaggcttttaggtgtctcactcatatgacaataaaaaacgacaaggtagagagtttgggagaagttggggaggtgtttcggagctactcatcttctttgcgatccttgaatatcacaggttgctccaacttaagaagtgtttctggagggctggagcatctcactgctttggagattttagaaatatacgacacccataagctgagtctatcagaagacccagaaggtgttgtgccatggaaatcccttcatcactccctcagctacttgcaattgatgaatctccctcagctggtcaacctgcctgattcgatgcagttcttggcctccctccaaaccctttcaatggtgcattgcagtaaactggaatcagtgccagattggatgcccagactcacttctctcaggaagcttatggtttcattctgttccgcacatctggagagaagatgccaaaatccaactggggtggactggcctaacattcaacacatcccctgcattgatgtcacctctagccgtcctaagtttttagtgttgccgtatgaataggtatatacttctttggttttggttcgtgcttccatttagctcaaattggaaacgagtgtatgacatcagagtcttctcaacggtgaccaatctgcagttattgccctacgtgtatgttgatggcaatgttcaatagttcatgatagctaacaacaaatcaaatttctttgtccattgtttataatcccaaatccaagttctttggaagattgtgctgaggagagcttgatgaaggaacttgtttaaggttttttctcttatggattatctttctattgtttataatcccaaatgcatcttggtctgagaaggaattccatattttttctagttttacatgatgttaaggctgtttgtatcacaggctttgccaatagtataaattttataaagcactactgtacagattatgtgaatcttcaaaggtttgagagaaccgtcctaaattcatgtaaagttggagttaaggagcaggaaatggagttacttcaagtgttaatgcaatcagctcaaaaaattactaatacagaatttattcgtgtcacaactcagaagcctttataaattataaaagtagtaaagatttcgtttcgaaagtattattcatattagagtacaatgaataatttgctttggcaaagccatctgaaggtccttaagaaatgtttagtgcaggtgatttaacttgctgtgattatgtcaccaggagaacttgcttatcaaagaattcagtagcaagttgacagaacatccttatcaaacatgttagtgcagaggtcagagcatgatacactctcattagtattatattttacattattatgaaaatatattaacatctgaaattatatatgctgatacaatcatcttatgcattttgagttatacattaaagtttaaacacagtgaaaaaattatttcgagcatcggcgtttgtgcttgtggttgtgtaatagtaaattggcaattgcttgacctttgtttaaggctgggtaaactttcaaaaagttgaattgtttagcagtagaccagtaactagccaaacaaagaccaagctatacgccatcacgttcactctacaagtgctaaagtatcttcaatgggaataccgacatctaaagtcaaaagtcaaacatctcagtatgaatatgtagattgaagactttctgtatgcattcaatgcaacaagttgaattcgttcacaccttattacttggtcaaaagttgactaattttacacaaggaactttagcatcaatcatcatcctactatctacgagttgaaagaaacttgtacaaaaacttgtattaaccctgatacagttcagttaagcctgtttgttgatcagtctgcaatttgaatcactcgtccactcgcatgacttagtgtgcgatcttgtgtctagttttctcgagaccccgcctcctgaccgtgcccagctcaccccaaccattcccagctctactagctagtatcagcatacatgggaagagccaggactgtaagcatgtcgtttaccgagtcacagctgctgtcagcagcaggagatggagatgaggaattcctaatagaagctcttgctactcaacctattgattacttcctaacgcggagcaaaaacaaaaatggtgaagaacattgcaatattatccacattgcagtgttaaatgaacaagcaaagttcctcaatcgagcattgagtatattacccatctcaactctgcatctccttctctgtcagcaagatttttcctactttagttacaaccctcttcattgtgcatctttacgaggtaactttactattgtcaagctcctcgtcgaggtttacgaatcatcatcttcttcttcttcgtcgttggttgatcgaagctgtaagccatggttagccaaggatgtgaacgggaagacgcctttgcaggtggctttggataggggtagagatgaatgtgcattaaaaataatgggattagatgaagaattgctttgtaatatggttgataataaaggtaacagcccgctatttcaagctgtacaaagaggttgtgaacaaattgctatgaagatcttggcatcggggcattcttatagtactggtggcgagtatgagttgactccccttcatgttctaccaaattgctcaggtgtgtagtattgatttgtttttcaatttgttaaaattttttacgctttctgtcccttaatttttctcacatgtgggtttgacacagaaatttagtgttaagagcaacttcaatggtcagctatgcactcttctaacttagctttccacctcaactacattcaagtaacattagtttcaggctacaacgtccttttgggtgcattttcttcacttgaacttatatgatcaccgagcttattactcttgattggacctaatcaaccatgatacgtgttttctggaagttagcagtttcctaatttagttttcttctgtacaatttcaagataactaataaagtattagcaatcctaactataaaaaaagaagaaaacactagcctaatatcatctgatctgcagaggaagtttgcgaacttctacttgacaagcatccagaaatgataaaagcagtcgacaaaaatggacttacaatcctacacaaatgggcaatgatgggtaaactatggccatttcaatttcttttaaagcaagaaaaaagttctaggttgaggaaggacttcatcaaccttttatgtgcaactgagaagtcgacaggcaacaatcctttacacacagcagcttattaccacaatgaagaaactgcgcaggttgtgcagcttcttgtagaagcttatatagatgctaaggaacaaggagtggagcttcagccgagcccttggacatgtgagaatatagaaggagatacacctttgatggtatccttaatcaacaaacatgaaaaattggcactgtatttcatgtctgtggatatggagaattcagttgtatatgcaaccaagagtgtactatattgtgctgtactgcgtggatgtgatgaagttgcagaagaaacagtggcttcagttgatcctgcctgcttcagcttcatgcagcttaaagacgatggtgggcgaaatgtcttgcatgttgcatcaaattgcacaggtgagagtaccttattgcttgtatatctttcttcttatttgaaaaatcttggaggaactaagcacaagcaaggccaaggcttcgtcgtgctgtggtgggctcaaacaaggcctatgcacagcctggcccacatgggtgcaggcggcctctttaagaaattgaggaggccgaaacacggctggctttttgggcttgtgctcattttcaaaattgatgcccattacagcccacggagcactgctgtgatcttgtgtcgtgagtcatgacaggccagtaacgggcttgtgctgggcaagtaatatggcataactatccttatcattatttataaccggaacatctcatatatgcaaacctttaattctgactttaatcagtttattatagaacatggaaatcgaacatatctcagcagcatattcaagctattgtaaacttctttaaataattaaggtggtagacgtatatgccttgtattatttctggtcaaaatgagtatcagggaaatctaataaaacaatttaatctttacctatatagcaagaaaacagttgggattttgaaaacgggaaaatcttgagtcccatccatttatttgcttcattaccacggaactggggaaatttcacatacttgaagtttcggtgcttcatagattctaacattgaagtgtttatacagagagaacaggcaccttgttggtggaaaagctagcttggttgatcaacgagccagatgatgatggaaagagaccccttgatatagcttcagaagttggtaacgcatggcttataaaattactgctgacaaaagacccttcctcaaacacaagtgcgccatttgcttggattgaagcatgtaaaaaaggctacttatcagcaatacatgctttcatagaccattcccctgattttagaacattttgtctccaaagaaaagactctcctttacatcacatacaactgagaagttacaaagaataccaagaatttcttgctattccgttgattcaagagatgaaaaatatgctcgatttcagtggttcaacgcccttgcatcgagcattagaacgtaaggatatcctccttgctgaagcactgctctctggcgatggggttcatagaagcatcaaagataaaaatggtaaaactgctaccgacctgctagtaaagctgtgcgaccaagagtatggatgggtatgtgtctccagtctccacctaattcttccaatctagaaaactatgattgcattaggaaatacttctatgtcagttgtcactatcatcccttgcttgctataagtctacattgtcttggcaaaaacataaaatgagcataaatataaaggttaattttttctagggaaattgtactgcgtataccctaaactagaatttgccaaataaccttagagattcaaaatatatccataactattaactttggctaatttgtaatggttttctcatatacaatttattgattcaaacctatttctgctgattaaacttgattattggtaatattgaagaaaaattctcatggccttgcaagacagtgaagtttccatgaatctcggaaaaatgacagccacaggataaaataagactgctttagacagcatagtagctcttatgttttactatatacaagaatatgtaaaagccttgatctatgaaatgaattgttctatatatattattatggtgatatgcaagctccttctttgaattcaatttcaaacaaaatgcaggatactatgtgcaaacgtacacaaattagtccgtggctaacgacaaactatatcggaacttcccttgctaatgcggcctttagatacagaggcaatacaagacttggtacaacaccatcagcaggagaaatgcgtagcacactttcagtcgtagcagcccttctagcaacccttacatttgcagctgggtttacacttcctggaggccttaacgaagatactggcgaagccatcttagcaaagaaggtttcatttctagtgttcatactagcagacacatacgcgatgtgttgctccatgttggtgctgttctgcctcatatggtctatggttagcgacagagataagtcacttctactgattgatcgaagtgttgtgatactcgtccaatcactttatggaacgttaatagcattcatggctggagtttacactgctatatcacacaagtctttgtgggcagctattatagtcattgttatgtgctctttcgttgtgatttcagctaacagagctattttggataaagtgcttgataagttgatcccttcggctgatagtaagagaagaaattaaacccagacactggatggatttctggatgatgtaggctctcctataatctttcactatcttatgagatttacttcttgtaattttggatattactgtctgcaatgttgaacccacacattgctaatatagttctttgttatgcaagtatggattcaactctggactttggtcagtctggtaactagttgcaccccatgaccccaacttttagttattcttatactacctctgttttgtttataatacattggtacaaatcttattcatgttactagatgaacatgctaatgactagttttataatcggcttgttagatggagctctgagtacacatttgaaaaatatatctaattaaaaatattaaaccgactttaaacttgtacgatacatgagattataggaaataaagaatataagttttctaattattatacggttttaggaaaatttagcaattagtttagtcatatataatattaaagcaagaaaaaattagcctacatggcagcttcatagaaattctgctctcacaattcaccccacattcatagagcaatgaaatagatgccacgtgtcacattccattaaaatgattatgtttgattcctttattattagtttcccaaattttgaaaatcagtcattgaatgctttaggaaacctccaatttccttaagttgaagatatatccgtgattttgaaagtaaaagtaagattcctcaccggaaggaaatctccacttaagcaaatcttccaaggtttttcctttcctatcaaattttccattcagctactctttttgaagttgaaaaatatttgcgggatgattttagatttgatacttgaaattgtttaagaaaatttagttacacacaattgaatgaccgtattataaatccgtgcaagaatatatacgcaattcaaagccacgtgtcaatcctattaaaatgatttcattgattttttttaaattctttaaggaaatttagttacacacaattgaatgattgtattataaatccatgcaagtatatacacatgcatgcaaagatgttttactctttttctctctttttttttttctttgagatacatgcctcgtggaaggatgttcaacaatttttctagatcatttatgagaagttttttttatccaatagttatcggttttatatccactaattaggaaattgattgttttataattgctataatttaggcaaagaaaggactaataccaactctataattataagtattcacaaacattatgttaaacccattaaatattacatacccacaatttcaaaacatctcaccaaattgagaatcctcaaatagagaaaattatgataaaaaaagggtgaataatcaaaggtcggagaaaaatcgaaccaaaagcgaaataaatgagtcggccatggacatgagcaatcgagtaagttgagagcgagtgagtcagctcattttttttgtaattcatccaaaaatgagtatcaattcgctcaattggagtaagaaaaaaaagagagagaaaaactcctacaaaacaacaattcatacaacccgcacaacaaaacggcagtagcaaccgggaaccaaccaacggagaggaaagagaaaaactccaaccccaaaaccgccattagatgagagagaaacgaaaaaccctaacaattaaaattttcgccaatgagaataatttgaagtgactaacaattttctcacttctctacaaatgagatagagacaggaagaagagatggaagtattcaagtattctctttaatggggagatcgaaggatttggaggagagcgagagaaaaaagaaaaaatggtttatgcggggggtttgagtttgagtgtggtgtttttttttcttcttcttcattccttcctctgtttactcttttacctttttcgcggtgttcctatatgacataatcatcctattatatatcatactttatgaaagaattataaaacaactcatgggtgatgggttgaatgaaaaaattgcaaatgtgaagcaagtagtatatgatatcctgataatatgttagccagctaattaattttcttttttcttattcactattggtaatgaatataatgagattctagcccgtgcaggaggaaatgcaaatgcaataataatagtcacaccatgactatgatcagaggttacatataacaaaaacaataatagctcaatctttagtcccaaagtggtctaaggtgggttaatatgaatcatcataacaaatcatatccacgaccaatacatactaatttattttaaaaaaaaccgagataaggcatgttctctttaccataaaacaaccgaatcaattgaactaaacttaattaaattataactaatagtaatgataacaatttaggaattgaaccgaactgaaaataagtcgggagaacagtcccttaaagtgagagaagtaagacaagagacaatatatgaaacaagaaattaaattaggtaaaaaagtgaaaaccaacatataagggtcggttcacttcacttattttgacaaaactatgacgatataagttcgaaaaaatttagatgattaggtgatctaacgggttgccaaccctctaattattgaaatttccttggccaagagtacattcagacattaattttatgattgttctctctccaatttattttatatatatatatatatatatatatatatatatatatatatatatatatatatattactattattattttattgtatctaagagggttaaccttaggatcactcaaaatttttccacgatcttacattcaaatgaaacaaaaaatatgaatacacccacttatgaacttatgcttgatattaatatcatttttaaagaaaatgtacactttgaattaggcccattttatattaaaattctaaaataaaggattagcagagagagtgcaacatggcccatgtgcttaaattataaatatagctttctttaatgagcttcgagacactaattgagaaggtgaatcaacaaaatgagttaattatatatcaagcttatatatcaaaagagggatttataagtattcaattttagttggtctataagacaagaaaaagcgatgttgaaagattagaagttatcgaattagaaaagttgttaatttgcctatgcactttgttttgacagcttgcttcttttttctttgatgtaaaagataatattgaaatggaaatcatatggagaacttacataacacacagacattatacaagtattgtgtatttatatttgtttactatacaaaattatcattttctaaattattcttaatattaaaattgtggtggcttaatatattctaaaattgtttttaggaagaaactaatgagcaaggattatttcaagtagcaacaacggggaataaagtatttaagcaaaaaagtaaagtgggaaaccccgtatgatactcattacgtcagatggaatggggaataaggtatgatacaatatattatcgaaatgatggtaatttcaggtagcaacagggaataaggtatttataccccatatggtacttattccgtcagttagaacaaaattttcttatgatgtttcaaaaaatacacacaatttggaataaggtatgatacaatatatcatcgaaattgtggtatttcagttaacaacgggaataaggtatttataccccatatggtacttattccgtcggttggaacaaaatttcttatgatgtttcaaaaaagacagttttttcgaccatgtgttaaaagtcaaggacaatccctatcacatggtagctttgtatctcgcgagaccggttcttagtcatggctaattttatgtagccatttctcgatccacgagtaaaaattgcctaatagtactaatttatgagaaagaacatgggaagtctaacactttaaggtcatttcgagtaaaaaatgaagattgtaatgtggagagggtttctaagacaattgacccctaagtggttactaggataagaccaagttcgtgcaaattttctccctttttgatgcagttgagatcattaatttacctttgtcatctcaacataaggtgttgttggctttgcttatgactatgttatacaacctccgttctttttctactgcaacaattgagttttcacgtttgccaatacactattttaactattaatatctttaattactttttagtaaaattatacaaaattgatattctcaagtatatatcgagacgaatctaacaagaccccacatgacaatatttttcccgacataaaaatcataatatatagtgaaaggttatgatggtgaatggatagtgtaaaaatctcattttgcaatattatagaaatagaacggaggaagtaaattcttaataaatttcattttgcactaaaaagaagtcttccaaaacatatcaagatcatgtatatgttaaacaactttataattaatataaaggtgtatatctcttaaacacgagtttttttatcaagttaacgtaagaattgtttacacgttttcattgtagctgatatataaacattgttattatactaaatagttcccgtgcattgtgcacgggcctaaaacctagttattatattaatttgatacttagattttcaattagattatactagagtatataaaatttcctaattatatgtattcggttttcaatcagaaaataatcatttagttttattataaaattaaattactttttctagacggtgcttttctctccaaagtttcctcctttattcacacatgctaaacatggaagaatatatgtagcattattgttttcacacatcattttctaaaggttgtatgattcttattccaaagcaaattaccttcgataatgttgttactcgatatctaatagaaaacttttccatagatgatatcaagaccttaatgattttaataattatccaaataatcgccagagcaactagtactttttaaacaataatatatttttttttgacaatggggtaaacaataatatttcttacataaacattttcatattcttagggggaaaaaccattaagaaaaatgcatgtatctattggatctctatacaagtttattttgatagttcgagccctaaattttgtcagcaagtcatatgtaagatttgtgtataaactataaagtgaactattgtttatttattagctatgaattaggtttcacaaaatattatataaagttgaatgataattaacggaaactatgctgatattatcatttgagattttctcttcatgtaaaagaccatttatcttatcccttatctctactagtctactttaagttcttgtgttatgtttaatttttgtcttgtatttacctaaatgctagttttacattcacaactccttttcttcaatagagctatttaacatttcaaaatatgctataattttatattagcaaatataaacgtaatgatcgggattccttttattttttcacaaattattagaataggcggtctaatttttacatgaattagatgaacttagaagtgaatttttcaaacaaaccgattccatttcactctagcccaacactatcttagtcatcccttatcttttccttcctttgttttcttgattctcgaactacaacagacaattttaagaaataactcggtattcttatcgaacggattaaactagtcactaaatggataaacaagtcactgaatgggttagtgaatgtcattcacgaaatagattaaactggtcacgaaatagagtcactatatttaaaaaggtggcatgttctctgctgaatattagacttgcaccgtgcctaattttaaactaaaagtaggcggtatcttacaagaccaactgtcatttttccacttccctaataatgagtaatcatgttcatgtatcatactccttgaacatgacatatatatttttctagaatgaaaaatcacctaacacaaaaaggggaaccaattagaaagagaaaaagaaaagtaacacaaacaacaatcaaaacatgaaaacaactagcaaaatttattaagtactaattaatacatctagttacctaaaatgcactctaattactttaaaaagttcaaactccaacaatagtgcaaattagcataaacacttgttacagcaagttgtgcaaactcagacacacagaccacagaaggcggagtccccacaccagaggggcaactctaatttctccaacgtctcctttttctttctcttcttcttctttgctttctccctccagaatctttctctctcttccatttccaggtttctctctcctcttctctgcttcttattttttgaaagatgcaaacttttactgaaatttatgttttgaatagtgttacttgttgttatgctttaaattctgagttgggtcactttcatttttgtttgaattcaatgggtttttgctgaattatgctctttttactccagtgaacggtttttcagtttctgggtgttaactgtatttagttaattaagattggtttgaattcaaaaaaaacttagggtttgttatttccatacttaatctttatttttaatgtctgaatatgtaaaaatgttaaaattatatgttgaaaaaatgagtaaactagtatcaaatcaaagttttgaagctttgaattactgatatgctgtagttgggtacttggtttgatctgtgagattattcataagatgctatctttatttcctgttttttttttttagtgcaaatattctgaataaaatatgcattagtttactttttcgatagaatataagtatttgggattctaagttatgggacactcaattttatatgcagatccagctgttccagactagactaacttggtagcttgagcttcacttgttgtgcttggatctattgagcttggaagttttgctgatttagcgccatatgttctagatgtattgtgttagtcaagtaaagtgttgatattgaaattgggacctttagtggcataagggtggtttattcttcatttagaattttgaccttgagcttagttttggaattgagtggttgagaaacttcaaacactttggcttttcagtttattatacctgggtttttattgaggaaggtagtgagaaagctccaggaaaatttgactcttgtgtttacagaaaagtcacttggtcttctcctataattttgctgtaatcctggttctggacctctaggctctggaatggcagttggcaaaaacagcagcaacgctggatcattaactcggcgatgtcattgtttcaaggtggcaaacttgaaggaaactattttggatgctagcgagacatccgagttaaaagatcgttatgttttgggagatcaactaggttgggggcagtttggtgttatccgggcatgtgctgataagtttactggagaactactggcgtgcaagtccattgccaaagatagacttgtaacacaagatgatgttcgaagtgtgaagctcgaaatcgagattatgagcaagttgtccggtcatcctcatgttgtcgatcttaaagctgtttatgaggaagaagattatgtccacttggtgatggagctttgtgccggtggggagttgttccaccgattagagaaacaaggaaggtattgcgagtctcaagccaaagtcatcttccggcatctaatgcaagtagtcttgtattgtcatgataatggtgttgttcatagagatttgaagcctgaaaatgttcttttggcaaccaagtcttcttcttcgccaattaagttagccgattttggtcttgctacatatatcaaaccaggtagaacactcttcttcatctagtttgtgattttagctgtgttactcggtctctttcaattcacctcaatagctgtccatgttgaattttggatactttgatcaagtcagtctggcccctaaacatgttcctgcgcccaacactaacagtgtcttaagcctttggttactggtcaagcaggggagagtttgcatgggacagtggggagtcctttctatatagctcctgaagttctgtcaggaggttacacccaagctgctgatgtatggagtgctggcgtgattctctacattctattgagttctatgccaccattttgggggaagacaaagtcaaggatatttgatgcagttcgagcagctgatctgcgcttcccttctgaactttgggatcggatatcagaacctgccaaggagctgatcaggaagatgctttgtgtagatcctttgaagcgcttgacagctgagcaagttttaggtatatttttaatttttgcctcctttgctgaattcagatgacagtttttttgacacagtatacatttgtagaacccaagtgtcagtgaatagccaaccaatgtctgaaaagttttttttggctttcgattacaaaatcatttattacatatttgcattaactgtgttatttttgacacatgacatgaaatcttcattgcttatttgtgattctttgtaaattgctgtacattggaagctgctcccttttaacatttgagatgtttgtaagtggtgagtgtagctcatgtgtcccatggagacaaagcttttggatgattttaagacaaatgcattctcagcttatctgatgatgttatccatggtgtccgtggacacatgtaccaacactaaaaatctagtatttcttgttggttctttagttttgctggaaatacttaagggctaaggctttatttttgttcctgcagctcactcatggatggaagaggttactgtagctacggaagaatcacatgaacatgatttggcctgctctgaacatttaaaaacccgagatagctcattttcagcgtcatgtatatccagggatcacgatataagctttggcactggatctgcggtaaattgtgaacctcaatctccaacatttacgtgcagatcgtcattctcggcatttatggcggaaccatccacccctacccttatatctgctggattttctttccgtagcagcggtgatttcactgctcttgagtttgtttctccaattccttccttgcctagcttcacatttttcagccctaggtcagtagatgagcatggaaaccaaaataaggttttttcaagcaacagggagaacactgacgaaattcatacaggtaactcacttttctatttgtaataatttgttattgtcactgattctctaatgtcatttttgcatctctaggtcttgtaacattttaaacgtcatataaacatccatgacattttatgtattttgctcaactttcaagtatttttgtatgacttttaaactttcaagttttatctgcgtataacttttcatagcctaaccgtttctctgttgtataagtatatgcgaaaaatcattcatcacatgaattgtttgaatctaatgttggattgtgcagcctaaccaactcgagtttctttaaaaaaattgttctgtaattcaattatgtcctccatatcttatctttctttacttttaaagcactattgagaaacagaagaaaaccccagtgtgacgactgtcagatgtggtttgattgagattagactattttatcagtgttgtgttatttagattccagtgctgttaatatcattagttccatcgtaagcttttaaagttatcaattcataaaactagatctaatgcccatcgtatttttagaaggggccgacttggagaagcgatttgaatcacctcattcatcgctgtgctcaggaactgatgctagggacctgaaagagaagtcagcagactctaagagaagtggaggaacaggggtgaggattttggggatccataacaagagaaataggacgattgggcttggcgaattcaaccagcttgatattgtggtcactgaatctgtcatccgatgggcatcctgcacccacttacctaccgcctcatcactcaggtcttctcttgtatgctgataatcatgggtcgaccacaatgtatccactatgtatcaaattaacatcataaatcatgatatgaagttgggcaacgcgcaaacgtgtgaattttactgctctactacaaagattgaagatataatgggtttgagtcgcgtgtactgttggtgatgatcatcccatattagagagctaatgttagtgactagattgtaatggatctgcagaataagcagattcttcttcaaaaggtgtaaagcatggatttcgaaagcaatggttttctcaacctttttttttatcatgatttagtagatatatatagggggctttctgttcttattagatgtgattgttaagcttccttcatgaacaaacataagcactggtgacttgtgggatggtacatagaaagagttctgtttcatcgattttgattttgtccagatcctccttttctttcgaaaaaagggaaggagagtatccgaaagattacccattttgtattttcagttgtctttaaaagattgatccattaccttttggacaatttgattcctataatactcctatttctctacttcatttcctaccatatactattatattaaagataaaattacttaatacgaacttaaaattaagaggagaaacaaggtaaaattttgtgaggatgatggaggaatcatatgagagcttacacacattatatgcttgggagtatgatgtacactagttaatgaagattagatacttttttatatcttttgattcgtatgttctttaataaatgaagatggtatatttaaaatttcgtgtgtatttgaaaatatcatgcacattagacacccaagtttaagattaatttcgcaattatctattttttttcttttctaaagagattaaaaaaggtaagatattataatttttatccaatctgactcggacataaatagctaaaatttcagaattaaagaaaaatcaaattgaaggctgaacaaatgatgaggatcatgtgaaattgagtttaattagtagaataaatgtagctaaagtttccatgcatgagaggaagaaattattggagttatatgaacgtgggcatcttctaaattattacatatatgttgacttctatattgtgtggataatactaaaagattcatatatttttgatactccaaattgaactaatgaatgtttgagaagaaaaggaagagaagaatctgactgacacttataatcacatattcagtgatggccgaccaaaacacaatataatgttctggacccagcctggttaattcttcggtataaatgcaatgccccatcaatatttacgtgactttctttattaacacactgaggtctgagtagtactagtgaatagtgattggtggtggaaggaccatcgctacgctactattcgctggatttcatacatctttaaacttaatcattagaaaaagcacaggttgttgcgttgaccttttcataaaagtcatagtatataaaaattattacaaaagaccgtttaatctatataaatatattaaaaggcgtgcgaaaaaaaaaaaaatcaagaaattgaatagtataggtttgatcccgaaacttcaagtacatatacagaggggtagatgagggtgtgcaaggagcccaacagcacagggctctcaaaattataaaggtcccaaaatatattattttgaaaattttacttcatatttcaagaaattagtcttgttttgcacccttaataaatttgtcaatgatttatctttagattttcaacttttcatctttagaactctaaccttccatctttattttctataaatttaggggcccaattttcatattagaaccggggccccaaaatcttcaagacggccctgaacatatactaaagtcttaaccattcggctaagttgtatatagtgttattatcataaaatattatgttaataattaaaaaaatttcttacccggggcatagcccgggcctaataactagttttaatataaaagttgacttagtcactaaatgaattaaacgaatcaccgaaagaaattaacctagtcattattgcgctgattttctttttaatattgggctaaccattgcttaattttaatttaaaagttgacggtttcttacaagacaaactccttagtatattgtttggccgataataccgcttaatttctttgatagactttatcccttttctttatattcttattcgactgatatatttgcaaatgcacatctttaattatatataaatttgtaattacctacgtataaaaatttaatattattaaagtattaactgagacaaatcaaacaagaccctattgatcaagtgagtttcatctttgctcttattggtcttattacccaagctttggagagaaattcacaggttccagactcaagaggtttaaggcaggaagtttttatttggtggcagacttgcagcaacttcgagagggttgggtgaggctcaatacaagtggtaaagctcatggtagtccgcgacttctcggtgatggcggtttgattagaggtcacagaggcgaaaccctcgaagtatttgcaatgaattgtgggatttgtacgtgcaccagagatgaattttttgcggtattgaaaggtctgattatagcttgggatggggggcacaaaaaatttacaagtgtcgatggactcagaggtagtaatacgcttgttgatggatgaggttctcgtccactctccatatattcatattatttgcaagtgcaagtctcatgaatggaaagtagaacttgatcattattccagagaagctaattaggctgctgactgattggctaaccttgatgctcgatcagaatcgaggttaatgctgattgaggtgatccccacggatcttcatgctattttattggaggacttgggtggtgcggcttggtctcatatggtatagatacgtccaacgtgccttctagctagtttcttttagttgtagtagtttagctttatttttctctttcttagttcctttttctattttgtagtttgtaatttttttttgtttgtaccaaaaaaaaaaaaaaaatacaagaccttattaccttacatggctatgtttttctagtgatattgaattttttttggaaaattctatattatttcaaatagtgtcaagattctaattagaaaaaccaacaagaacggaaagactacttcattttttaaactaaaaatgttattgggagccctactttctttattgaatactgtatagtattgaaatcttgacttcttagaattgagaaagaagcttaacttagtttttgttgggtaaaaaaaagtagcataccaaattcttttacgtgaactttgcttgaacaatatcattaatgcgcatcaaatcaaaaacacgtattatttctggacaatttgctatatcattaaaaacccgttatatcatgtagaaacccacaatagcgtgcagaaacttactatatcattgaaaacatcctatatcacgctgtaaagtacattatttctaaacaatccactatatcatgaagaaactactatatcattcagaaactcactataacatttagaaattcaatgtatcattcagacactcgctataatatgcaaaaaccacatgtttctatatgctaaaacacatgtcatgcaggaagatggtattgtaactctaatccaatcgtgtggttgagattctataaacctcactgtatgaagttaatatcaattaccaatccggtacaaactaagttagtgtacaccagatccattagttttcttattaattgaaaagtggtactacttactgtcaacaaacacgtttctaagatcaccatggatgaatttccaatttgaataactacccacctattatagatgggtaacaaacacgtttctaaaattattgaattacacaatatgaatagtccttttatcgtcttctcctaaattttagtatctaaaataaatcgataatataaaaaagaaaaaaagtagtatggaacatcaattgattccaggtaaacaaagtatatatatagaagtatttccactacatttttttttattgcacctttttgtttttgacactattcatcaaccgactttgttaagttaccttgcatcattatataagaaaaaataatatagtcaagtggagtcttgttagatttgtcttaatgcaaggatttcaaattcttatattttttgcaccttccgtaattaaaaatcttgacgttcaaaaaagcgtctcgacaaacgtgaaaaataaaataatgcgatttaaaaaaactgaagaagtataatataccttatattgtgaattgaaaaggatggattactttacatgtttgtgattgtctttgtaattgattgtcctaattagactagttccacgagttatatgtctcatggtgtcgtattgattattgatataattctgtccacatttgataccaattttatgtgtgcgtggtggtgatcattttgtgtaggtctaccaactaatcaacaactcaacaagtgtacttccttttgcagattcttcacaattgaaatttgatttatgccatatttaattgaaagccatcatattgtatctagaaactaaatcttggagggcctagtttcttcacttacatttcactatgaagcataattgttacatacggttttttggtggtccacatgtaagagttcaatgaagacagtatacattacttcaaaatgcttatgttgagcacttgagcctctcaataacatcactagtagcgactttgtcgtttgattggaagcggactactccctccggctctactagtgaaaataacttagtacttctttcgtttcattttaaataaatgcaataaagtaatattttatttaagttactattattatctcttctaggaatgcttatcagtcgtgccgagtgtgaactctttttagctcaactcgtgttcatttaagttcatccgaactcaagccgagctcgaacttgatgaaccaagctgttatcgaattgctcacgaacaagtttgacctatttttatctttagtttactcgtattctttatatatatatatatatatatatatatatatatatatatatatatatatatatatatatatatatatatatatatatatatatatatatataaggataggagttagctcaagtgggtagagcgctccctcttggcccttgaggtcaggggttcgatccttacccccaacattatgcgtttgtgtaaaagttgagaataatttagtcaaaacaaattaataaaaagtgaaatacgcacaatattttgaaacacccataatagtaagtccatgccagacgtttccaccatattggaaatgtccaatctagacgtgtccaccacgaaaacgtttgcgcaggacgtttccaccgtcgaaatgtctgcataggacgtttccgccatggtggaaacgtccatgccaaacgttctgcggtgacgcccaaaaaaaatccggcttgctcgtggtggtttgcgtggtttcagtggtggtgtgcgtgacctcgatagtggtttgcgtggcttcggtggtggttgtgaaaatggaagtggtggttgtaagaagaaaagagaagggtaaagttagaaatatttgatggaaccagagtgattttaagtaattttggaacgatgtttaacaatccctatattatgtgaatggagaaatacgatacataattatatgataaagcccgatttctccaaaaatgtgcatgaatgatgttcccatagaacatgcttgtttccataatcttgtaaaaaggttttattttttattctttttttataaggaaaaaagacttaggcaacccacctattaatcagcgggccaacctaaaacatcctttcggatgataaaggaaaaatccatacagtacgggggaaaccagtacaaaagagaggcgtagagatgcgcctttttagccataaaatcagccgcccgatttgcttcgcggaagcaatgaggaaactggcactccgaaaagaaagaagcatccaaacctgcatccactaaaatgttagagatctcccaaggaatacgccaaactttcctcatagaattaataactaccaaattgtctccctccacaatgagctggaaaatattcagcgaacgagctcctttaataccttcactaagagcccaagcttcagcttggacaatggaaacatggggcccaagggacttagccccagccagcagcacctccccccactattacgaattacaaagcctaaagtagcattaccattacttaatttagagccatcaaaattaagcttacaaaagtcctcaggagggggggaccaaataagccttgcaccagatctcactaccatcctctggctaatagtactgacaaaagaaatggttttataatctaaggtttccccttccctgtataatgcagtttactgaatgtccatcaaaaatcccttctaaatgggccataaaacccactgttaagaaaaggaacagattttagcccaaccgttcttaaattttgaatcagccaaattttacatggccgtgtttcatttctactcgattgccaatggacacttgtccaggcctattacattgttaccacttaccaggttctactgaaaaatttacaaaaatatttccaagtatgagcattttttcattaataactagttattaggcccgggctatgccccggtaagaaaaaaatttatttattaatattgtacatttatactttgacataataacactaaatacaatttggtctaatggttaaaactttagtacatgaatcatgaggtcatgggatcaaaacctatatactatgcaatttctaattttttttattgtacatggattacatgaactaaaattccctagggagagtgccacgtggcaccgttcctcgtttacgcacgccttttaatatattagtatagatttcaaataggagacaaattcttattgaacctagtccacactgatctttattttataagtcggagagctatggtatattggtatcccccaatataatcttaaataaagtataaataaaataaataataaaagacggatttgattaagtgatataggcttaatcaacaaaattaactagcccaaaaaacatgtctaatattcaaaatttacttttgtttatgtccaaaaaaattataaattatgttctaaaaaaatgagacacgcatcgtgtacatcaattgctagtactaatatagaccaaaggccatacataaaacgtatatttgaagagaggtcatctaatttcacgcatattcttttctctctctttttcctctttggcagttctctatccataattttcttcttctctcattcaactttaaaaaaatttcgtcttcgctaggatgaagagatgacttcgtttaggtacatactagttgcatatgcacgcgatgcgtgtgtcacaatattatgtagttatatgcaaattgacatgttttttttatctaaaattattttgatagtgatgtaaacgattgaggttcttttgtagatgttattatctttttaaattgaaggtgaatgatttttaacctagtctaataccgtaacggtaaaatttggtcaatgatttaataattttctttttagcgactttagtatagtactttaacaattatagatgttaataaatcatattgtttgaactttgtaaatatgaaatattatgttatcacgatatgttgctaactttttttggttgaatatgtcaatctaatttgtcaagttattaatggtattggatattccgatccatttttgacctactcatatggcaagtttcattgattctcatttttcaattttttataaaaagaaaaatattattttaaattactaaagggtaattttagttatttcagaagaggacatcacacctcctcccttggcttacataataaagatttatcttattttttattttatttcacatggatttatatattttcaaatttttgtgtttttattttgcaattgattatgtagttgaatttttgggtttgagagtttttttttagttatcacattttaaccaggcacaaatgccaaaagaacatgaaaacaataaaattttagtatggttttgttgtttgttaattcaatctgcttgatacttttgttaagaggattgttaaacatcacccataaagtacttaaaatcgcccaaaatatatttttatagctcaatttaccctttcctcttttctacactacccaccacccccaccaccaccaacctactgccatttcaccttctcttttccccaccaccccaccaccacctaccttcccactaccaccgtcgacctccactgcagccacctttgtgtcgaaatttttttatactcgagcacctcccgccatgacgttcagcccatggggcgaacgtccggccaggacgttcagcccatggggcgataaacgtcctggcgggacgttctcgagtataaaaaaatttcgacgcagctttgaataagagttgaatggtttttatttgattttctgggagtaaatcgaatcttttttataataatctgactaaaaaggaaaaatgatgaagtggagaagaaagaaaaagtgaagagtttgttaaaatggtgatgatgatatattgatgtttttgcagaatttttaacttcattgatgtggagagagaaatagagaagaagtagctgtagtagtagactagtagtagtacttgaggtaggggtccatactagtagttgatagggctagtttggtgtggcgcagaatgcgtgagctcattcaggagagagagagaagcggttagggtgggggtggtacgtaaacagtgaaggagagggaggggtaatttcaatggaggtgagggtagtggagtgaggtgcgtgggtggtggtggaagtcaggaggtgagggagatggtggtggaaggcaggaggtgagggagatggtggtggtggcggcagccaggcagacaagaggtgaggtggatggtgttgatttaagaaaaaaaagaggaaggttataaatgtaagtgcattgtttttttgggcgattttaagtaattgttgggcgatgtatagaagttcagtatgttaattgttggaggtagtccttatgttcaagatgttggatctgttttatgttgttggttagggtttgcgtggcaagagatttcatggttgggggtttgttttatccgattttgaaaatcggatcattcttcatgatctaacaatgtttagatttcaatctcgcttggtaatgattttatcaatcgttgccttgacaaaaagatatctgaaggcgactctctaatttgtcaattgggtttatagcgtgtcaactcatttgagtttttccttaaggagaagcctaaaatacccttcgaaaagggtattgagtcacaaaggaatgtgactcttccaggaaacacgatcgtagaatcccatgtgacagaaggtcactgggattggtcctgttgcgagttcctaatctcgctgttactttattgcctcgcttttgaaatcagccctctcctcccactcctttcatcagggttctggcaatcatcatccatcagctgaatacattcattacaattatgtatcaactcatacctctttatcgagctgttttatcctagtttaagttattcatgtttttgtaattgttatgatagaacgagtataactcaattaagtttctttgtgtttgtttggttgtattagcgatagactgtacttttattttaattaatgcacattttctccgttttaaaaaaaaaaaagatatcttctctcagtaaaacctgatgacaagatctactaatgaaagaaaaactatggataacaatcactagatcattttgagaatgcactcttgaatagtggatgttatggaataatccttgattgtgattattataaaaataccagtaataattgagaagttgatattaattctaagatcatttttatgaaaaacatttaggaaaaatcgtaatagataagttagctttttagaattttttccttacataatgcaaaagtgggttttaattcccaaaatatgccccaaaaaaaaaaattccctgcgtaccgtccacgtaggacagcacgcgagaaattttttttttccaacttaagtaaaatcgctacttgaagtagcagtttacaaaaaaaaaaaaaaatttgtgtgtgttgtatgccgctacttcaagtagcggttcattactcaagtagcagagtttgatttgtgcttgcaatattttgcctatgtaaaccgctactcagagtagcggtttatatttataaaccgctacttgaagtagcggtttatttttaaataaaccgctactgtgagtagcggtttttggtgggcaaaaacaaaaaaaaaaaaaatcagtttctcgcgtgccgtcctacgtggacggtacgcagagttttttttttttttttttgcatattttggaaattaaaacccacttttgcattattcaagaaaaaaattctaactttttagctaccttcttgcattacgttaatctttggattattccttaaaaacctttttgttggatttttttttgtcatcacatatttatatttccgtggacccgccaatttgaagcttgtggcactgatgaaaacaaagatccgagcttccgaaacaaaaacccaaccgcacatttttgttacattttttcttcttttaatccccaaacaatagaaatcagaaatttatttgagtagaaaagggttggaaattagtaactcaaaagatgagttatcatgttaatttctccctaaaacctcaaaatccatgtacatatattcctgctaaaaaaacactaccttcttctttactgatttcatattgtttatcacaaccaaaagtacataaaacccatatacaagccctatcttcatcttctcccatacaaaaaacccaagaaaataccacatttaatgaacctctagaattaaaatcatcaagtaattataatgttgaatttaagactatgggaggttgcaagcttggtatttcaagatacccagattttgagtatgatgctaatggtggatttgggagtggaagtggcaaagatgacttaaatggcaagattttggttgattttgatgttggtaagctttatataccatcattaacaagtgggacaactaagtttttggggttgcctttgccaccatttttgaggattgatattgtgccagaaatcttcaaaggaagcattgataaagagtcaggcaaggttagagatatagaactgttattttcattatttgaactttctcatttggtattttggtgttatgtttgcttgtgcactctaggacatgcttaaatgaaggattaataagatgacttgcaactttatgctcgcagctaatgtgacaacaattgggagtaggaaggggttaaaaggaactatgtcatatttttactataatcatctttatacttccatttttatactaaattattcaattttttaggttatgttgcctaatatgttagtttggctttgaatcaataaatgataagtcgtgtggcaacatagtatttatttagcaatatagtagtaattattgtggatatttgtcgttgcatgaagtatgagattaagggttttatttacaaaaagaaattgtttacaaaatctttttaatatccatattacttcgttttcatcgttatagcatttagctaataattaactagagttaaaaaaaaaaaagtaatgcgaacaaatggctttaattttgtagattagttggtcctatcctattttcataagtggttgataacttgacgttaaagaaagacgtaaatggtagttgttacatgaacaaggtagcatgtggcaagtattttaatatccatacgccttttctttaatacatatgttaatatgtacatctatattatgatagctgagttttgttgttttatatacattaattattgtaggttgatcttgaattcaaggcaaaattctggttttcaatgggagcaatttacaaagcaccaccattactagtttcaacgattttgacctctgaagaatcacaagggcaaatgagaaaggggagaggacaaagattggataaagatggaaattgcaagttagtaggggtggcaactattgatccaattgatgatattttcatgaactccttccttggcctcccaactgaatgccttgcctttttaaatgccacaatctcgctatgaatatcatacaggaataacctattttgatgaatgtataatcttttagatttaaactttttttatacatgaaagtatatatataagttcaaacttcgagctctaattaacccagtatgagaagattattcgattgtagcaatacaaatcctccaatcatctttgtcacactattttcatcatgcccatattattaatgggttgctaaataacgtcctaaaatttcctaatacatcctaattacgccctattattatgtgttcttaagagtatcaagaataggttagcgtgcgtacaggcacacacagagcaccaaggatagtgctcttagttaaggtttatcaatgtaactaattcatcattgataaatttcaaatcggtttcttcacaaccacatatgaggcattgtttggcgagtgccttccaaatgtaattcatccctaaatatatcaattgaaaaaatgatgtaaaatttcattgtttagtgatattacctccgtatatttcgatttaacgtttacacttttgcattatgttaattcacacattgtccaaaattttcaggcttatgttacaaaaattggtgtgtacgataattttactaatcgataattacatatattagtgatcacagttatttgttgacaaacatagtattgcagctaattaaggatgcaaaatattattttacttattatacaatcttttgtgacataaacatatttcatatgttacataattcatatgataattactatttcaaggtcacttaaataaactttgaccgtaaattttcaccattatataagaaaaatatagtcatgtgaaatcttattgactgtaatttcgttattagtctttggtaattgagtttgagaaaccatcaaattttcataattttcactaatacttccttcaattttttttacttgcaacattttgagttttgtactattcatgtacttatttttacctgaaatttccgaaagatatacaatacgaatttcagcttgtaaaatattattgaatttatctcaatatatgcttacaaagattcaactttttataactttcgcatacaagaaattagatatattaattattaaagttgtatatgctacaagcctacaagtaaaagatctggagaagtatacaagttgaactactaatggtcatagtgcattgaacatagtgaaattataagtgttgcatgaaaatgagaaacatataaagtattgctttcgatcattatatattataaattaaacccattctacaatcttatgtgacatgaaatatattgctaataaaacgtataggtcaagtagtcaactgatttacatcttatccaaagtaacaagtatacatggatttgtagttacaagttcattaatcattagtacaaataaagaaaattaaaagtatttaaaagaattcatatacagtcattcatgcctttgaagacgctaactgcatgatctcaacaagacaaacactatataaaatcaaagacagctgattgcgtgaatgattaaatatgatgaataaaacagaaatctgtgctcatctattgcgtgtgaagactgtgagctaatcctggacttttcagttgcaatttgaccaccataaattaccacttaattacatcaaacacgatcgaagttcattgccaaagatctttcgcaattagcatccagaaatgcagtgctttatacctgttcctgtaaacaaaaatattgtttctcaaacacaattaccaaagactaataacagttacaacaatattagtattaagacactaaatggatgcaagctgcaaatttcgcagtacagctttctgtacaatgcagaaggtgggagagggatcggcagccatatcaacaccaaagaagataaattcacaggccaggctccactcagatatgatttcaatctagaaacatttcacgttccaccattaacaagcacgacagcacagtcggacgggtggatccctttcccaccttttctgaaggttgatgttgtcccagacataatacaagggaacatatatgaggaatctggaaaggtaaatcatatactgactccacagctaaatctgccactacgtactagtttaattgttgagggtgtcgttctcttcaccataaaaataagtttcaataagtaatataatgagttcagcaaaaataaagtgaagagaccacaccctaagttagtgaaactatttgtctgaaaggatatagttactttgtacttaaggaggtggtgttttcctgtacaggtcgagctaaagtttaaatccagattcttggtttccatggggagcagctataaagcccctcctctgcacataaatatgatattaacaactgaagagctgaagggagcactaactaagaagagcgcacgagggatgaggctgggcaaaaatgggaaatgcaagttggttggtgtggctaaggttgatactattgatgacaattacataaattttcttcttggtctgccttcagaatgccatgccagcttcaaagctattatatctttttactagtttagactcataataaacccagaatactactgtaaaaggaatttcactgttccaggtcaagaactggaagagaacggaatgatcaattgattataggataagtcagccatgaaagtttagatgcaatacatggcagtattgcctattgcttaccatgtcttataacaattgaaacagcagccaattgtaactattgattattgtccttctaaacagcagagagcaacaagagctttcttagttcttcttcatcttgtcatcattgtatagcagcattcctttgaaacagaagcgtatctgtgtaaacatttgaaaatcaaatccgtgacaacctcaattggaccattaggggggggggggggggaacttgcttgaaaattattaaaccacctgtagtaatgatttaaaatgacatttacagcacagatggcaatatcctggaacccactggctgatactcactcaaaagcaagcctctggcttcctactaatgaagcatattggccattttgtgacgacaattcatagtgtgtcccgagctccgcaattctcccatctgaacaaagggcaatttgatgggcattctggactgtgcttaaccggtgagctattaccaatgttgttcgccctttcataagatgattcaaagcatcttggaccaaacgttcactaactgtatccaaggcactcgtggcctgcataaaatctcattatggttagatctatttgtctatgcagccatgaaagtttggaaacaagatggttatgtgagtccattgacttgactgtttgaagattgacacaatccacaagtttccttgggaagacaaaacaaagtaactaattaagtaagagaataaagatgcctgaaaataatcagatagtagatcaaaaaagcaggacagtagatgatggcagatgcatgtaattagattcatgtccttgcaagtgtcgggaggggtataagatagaagaaagagccaattctctaacacagcaaaaattgagagctaaatgtgggtaattgtcaactaagtaagaaggctaaatccataatcaacatattgtgaatttgtaatgaaatggcatagcttggactggatttaagaaactgatatatataactaagatgaactttgattgataatttctgggaaaacagtaaaataagatgataattacaagctttcgagaggcttgttctctcccattgaactctcaaaagctcgtccaattttcctaccaatattcaacatactttctctctatactatatatagagatatttccccactaactccctaacttattcttcaagctactgttaaacctaactaattatgcaataccaaaagtgcccctttccctaggttgattcattacacatatcaccagaagtacaagtccagaacagctcaggaggagacaacagaaacataaacaactgaagtacctcatcaagaatcaatactggagcatttttcagaagtgcccttgcaatagcaactctctgcatacaaaaattatgtatttagctttgtacatcttgagtttgcttcgcagaaattcagtgcaacgttaattcatattatacctgcctttgtcccccactaagtagacctccacgctcccctactagtgtgtcataacccttcgatcatacgagaattagtaagagaactatcaacagagataaatgtccttgtttcagaagacaaaaagcacctctgtccgaggagacaaacctgtggaagtgatatgataaattcatgagcattagcagcttttgctgcttttactatatcatccttggatacattagcatcaggtagtccatatgcaatgttctctgcaacagacacagagaagagtactggatcctgcacaaggtttaggtaactttaagcaattcaacaatcatgaaactgaagaatgccactcaatgtgcaactgctccatagcgataaacatagtttatacaagtgattagaagttaccagtctggcaatttaccagagtaagttggctagttttactccaaatgcttgaatgaactttagggttctgttcgaccgaccagtcaaaaagcaccttttgataatttattcattgctaattatagattattagaacaattaaaagcttttaaatgacactaagaacaaaaagattttcctcttcaaagctaaatgccttttgaatcaagtttttacatattaaagaattattgattcaaagtccaaaaagggccaaggaaatactacttattagataaataggtgaaaagtgaaattgtatgtttgtgttctataacaacgaagaagaaaagaaaatcagaagggaagcgaaaataagtaaaagaaagctagaataaagataaataaccaacagagagagcacatgtagaaaagaacgtagaaattaacaggaacatgaattttgaagcaccagactcaaaatatagcttcataaacacaaactaaaagtcataactcataacacaatacctaccaacgatgctacctcttaactatgtgaaccttgatacaattcaatcaacttagttcacacaaggtttgaccgaatcatttgagctgaacatgagcaatccaaaattctggttcaaatgggctgcggagaattttgtctttctagtctggtgtttgacaactctagttcaagctacaccccataccatgtcgaagactaagctatctaattccaaatggaaaaaaaagaaaaagaaaaagaaaaaggaaaaggaaatgagacaagagttcagaacgaatgtttaacagctgaaaacatacttgattcactattgagacagctcgagcccattcacttttgtcaaatgtccttacatcttctccagcaacagctatgcgtccactggttggctgcatatatgttaccaggatagctcatgttataaaactgtaaacagacataacttacaaaaataacgaagaaagcatggatgacagaaaaaaaatgaacctcataaaaccgtgccagcaattgtactatagtactttttcctgcaccacttgagcccacaagagcggtaactgttccactcttcaatgtaaggttaagaccctttaggacctcaacatcaggccttaatggataagaaaagtggacatctgcagtgatgtaatatgcaatgttagcctagtaactaatattcggaaacacagaaaatattcaaggttgaagtaactgatagaatatattttcagcaaagtcaacagaaatcacattggcacatttacagatttgctttacaatgagctaaattaaatgtctcacgactaccctgtcctttgattcctgttagcaatgaagtaaaatgacattgtctctaagttgatgctaaggtaatgctacgtacatatgatcccttaactctcacagcatcacaagagcctctttcaggcactgggaatataatattgatagaagcaacaaacaagaaatataaaggaaaagtcacatacttgaaagttgctaaaaatgtaccttaatattaccccttccatttctaaattataggccacatttgattgaggccatttcaaaaaattgagttgaaatattataattatcaatacaatattttagattttacatatccatcatatcaatgtaatatttcttttcagattcttagttaaggttatcatcaagggtaatctagcaaagcacaaagtttaactcgccaagtttccgaaattggcatattattttggggcaacctaagtctcttatccagatatgaagagagcataacatagttgcgcaccctgaagctatcaccaaatgaactgcaatccattaatctaaaccctacttgtatttacctgtgctgggagtagcaagaagggttttcaagggaagtcagcattattctaatactgagtggatgaagtggcaggttgtcagatactggagagaacggtatctcagagcctctagaagaaggtgggggttagaaggaattttgaaaatgtaaccagatttaattttgttgtgggagtaagtcagcttgtaattagcttcgtctaaatctagctttatctttgtcttttttcctatcatgaatcatttacaatcttcttcatcctcttaatcaacatcattgtattgggtttagggataatatgaagagtaaaatatagttaggctagcttggagagaaaggaagtatgttagctttatactccctccgtttcctaaagatcttcccacttactgttcctacagataccaaggaaaatcaagttgtgtggggcatggtgtgagtaaagtaggagagagaaaggggttaagataaataaacaaataaaaaggggttaaagtaggagagagaaagggagtaaaattgaattaataatgtaatggtggaccatatgatagtgacatgagagggtaaatagggaagtttgttttgccaaataaggaataaagcaaaagagggaagatcttttggaaacacccttaaacggaaagagggaagatctttaggaaacggagggagtactccctccgtttctttttaaaagttacactatcttttcacccttgtcaatataaatgttcgaacattaatatccctaaatttgcattcgtaaaaattataaaaagttgatattctagaagtacatattgacatgaatcaaacaagatctcacatgactatttttccttacccatttaatcacaaatgttagtcaaacataaatttgtgaatagtgtcaaaactcaaagtgtaaccattaaaaagaaccggagggagtatatagaagaaattagtcataaaaaggggtatgaagaaaatctttgagagttcattttagtggttagcttaacagtgtgtcgagtcactcgagaacttgataaatagctttacatttttgctaatttccatgtttatcaatcaaaatcatcttcctcttcttttattttactctccgaatttccagttcactacaatcattttcagcttattacaagaaccaacaactaaagcacagaaggcattagaggcatagaggccatttgtcatatatcttgtgtgggaaaatatggagcctcaacactatgttattgtaagcattttggagactatgatctaatacaaacacgtttctaagatactaacagcaaaaatgctgctagcctagcttgatataaaagattagatgggaaacctgttgatggcttcagggttattacttattaggtacggaagatgatgattggcatttatcttgttgttatcctgaatcatgttcatagagccgattctagaggaaagcatgcactttatgatagggaagaagcaatctgaaccccccccccccattcaatcttgatggtgtagcagttgggaaatcagcttgttggttcgctggtaagtcttaactgcttaatgaagatcttcttgagggtttttttagtccccaggagttcaagtgaagctggaaaacttctactattcaaaaccagatcttatgaaaactttcagaattagtctaaacttcacgcaggcttggagagcgactctatagtaatttccaatgaaagaacttgggcatagtagctgggagaaatttcttatcttttattgttagaaagcaaaacaaggtagctcattttttttttttttttttgggggagctcccaacatttaccctaccaaagcagcaaaatgttgattgacacataaacaggtatgagtgtacgacagacgaaataccgagctaatacagtatcaacataacatacttacgaaaatccacataaaattaccttcaagactaatgtcaccggaccaggctacgttaaacacgtcatttgatgagcctaaggctgacatgtaacgcacgtgattagatcgttgcttttcatcagatccattgacaatgaacaactgtaatttttcatcttgaatatcttttggttgaatctgtctttctaaaccataagcaagagcctcatcggtctctgacccagagagaatcgaattaattctctcaacagcagcaaaagccccacggagatctccaaatgagtaaaccaggccttgaacctacatagcacataatgaaatctataaggcacaataattgaaagttgtataccaactcagttatttgccacacgagagtacttacagcaaatgtaagagtaaaggtatatccaatgaaagaaaccacagttccaactgagagttcaccctgcgcattccattaaaacgtataaggaaacatacatagaaatgctcataaaacttgctagattattgtggtgcttaaggttagaattatctgcagctaacattagcatttaacaaggaaaatcagattatagagctgcagacattagccaagagaagaaactatactcctgacaatcaatgccctcgcacagaaattacagttctctctgaacatgaatgtcacagttaatactctggttttaataataagcccttgcaaagtagaagagaatggctttagcatctaatgagaaacaaagttgataaaataactagagacattagctgggagaaggaacctatgctcctgcaaatgaatgcccttgaacaaaactacttttgaacatgaactgaatctacgaaagatcctttggaagcggatatcattaaaaaccaagaacaattactccatttcccacttcagagtaacaaatgactcacctttctcttctgaaggtcacaatctgcccacattctttcacattttacatgtaaaattattcctcccatcagtaactaaaagctattctttaatatctccattcatatcagtcaaacacccaaaagtgcaactgagagtgagcagaaaattaagaaaataatacttaaaaaagatcctaaaatcactggttgttgatgaacacaactaaccgctttaactttgttccctccaagacaatacaaggccaatagagatacatagactgcaactcgggtcactgattcattaatggatttgtaagtgcccagctgaatgccactagccttatatgcgaaaatctgccatatcaaacagcatacatatcaaaaaacaaaaagcaaataatctgattcactttatcagatgatgcatactcaaggatatgacatatattacctgattaccgaatgctgacatttggcgcttttccccaccaaaggacctcacctgagaggtattgtatttagtgttcagtacagcaactatctaggtcggaccttgaagcccatagcccagaagcaaaagttatagcttatggttaagaatttcaccctcaaaggagcttacgctagcaaagaatgctaaaatgccaaattgcactggcacaacttgctgaaacagtgaaactcaccgtgcgaatagcagatattgtttctgacacacaatcagacattgacgactgcgccaacccatgagctttaaagataggcatagttgaccgcttgtacacagctgttaaagtaaacaagaggatagaaataaataaataaaaaatcggtgaacgaaacgatctgcagaatcattcttcaccaggacttgcaatcatactaactgcgaccttgctacatcataaactatatcggaaccatagtagggaaataaacatgatcataaattattgacttaaaatataaactactcattgacaaacagcctgtcaaatattaaaaacacgaaatcatgaattcttcaggatgcatgtaatggagcagccagtaagattgtgtcatagcaccactgaatcacaattcttaaataaatgaaaagtcaaatatgcatccccctccccacatgccacatagaccgatacagagagagaggatcacaagaatgttctatagccaacatatgtgagccagcacagcaaataatgaactataaaataagtgatagacaagtcacaactcacaagactaaagctattaaaactctaaaactagtccttcgtggcatgttatggcacgctctgttatgctcaatttcttagaaaaaggcaaaaagctgtagaaaagttggattgatagtaactaaaatctagataggaatcatctttcgcttatattattttcctttagtaagaaaatccggatattgtcaccaaaatcctttacaattgtgcatacttctacaagaggtcagtttccctttaggaatcaaggagccatattctgcttctcaggtgtataaaggcctttatactcaattctaaagttaaaaggaaataaactcatacttcaacatggtgtcaaagcttgtctgaaaccctcatcagcctcccctctcaatcttcaagttccgcatggccatcgaaatgaatcccaaatctgaagtcacatcaagtccaaatcaatcgcttccaaagcaacatggaaagtcaaagagttttctctaaaataaatggccactatttccatcaatggccacaatacgttatgctgttcatacgcgggcgaggaaaggatcatcaagccacagggttgttactcccagaccaagtgatcccgatttcaggaatcgaaatccaaaaatagtatggtgatgtggcaaggctgattaattccatgaccacacaatcgggaagattgtctcctatactcaactgcaaaagaaatttggaatgttgccagagatacctacgctagcaatgacaacactgaagaattgttcgccacctagagcactcttcatgatctacgtaaaggagattatctgtcacagcctacttgtgactcgatactgctaagtgctaccagttagatcttcacaaagaccacgcatggaaatgcactaaagacgaggatatatttttaagaaatatagcgataaaaggatattcctgtatgcaacaggtgtaaggctacagccattaccgcctcaagtcagccagccacataactctgttcaggatacattggtatattttcaagccttcaaggagtttcaggattgagagaggtagaatccggaagcagatgatgaagctggggctggtcgtgatgctgatgggactggcgggtggaggtagtttagaaagggtctgagagaggttggatccagtggaggtgagtgacagtcacagaagtagtaggggtgttggtgctcaagtattagggtaggagatggcaatgctcaacttgagaggatggtggtagcctagattacctggtaggacaaacttgaaagtagtgcgtgctagagtgaaacgtaagtggaaatcaaagtcctaaaggatcacgggggaatcaagaatgcaactagggtagactacttcatcaaaaataaagatacggatccgtaaagaaaaaagaaaatgaaccaaacaccaataaagggaaatgaggtgaacaatttcctttcccattcatgaagacccgaattcaaataatctctaatttattaacgacacgttcatgaaattaacatcaaatcgagaaattgtgagattttggacaaatccttatctttcaaattggtatagcaaggtcaaagttgacgatatgttccacttgtaagcaaggaattgccatatgttacacaacgaacggaataatataaacaaaagagggatgtaaacagtctgtaccaactaaaatggagacaacaagcatcagcaaacccaatattggtgcgagttgtggtgaaagagtaaacaggatgcatatagttccaacaatctgaaagcataaaaataccgagtattcttagagggacattaagcaaaatgaatccaacagaaaattgcaggaacatgcaaaaataagatcaaaggcagtggacaaggaatgcaagtccaatgacgtagatcagtgatcatcttcagtacacaattgtttttatatgaggaataagattggacttcattctttttcaccttattttttgcttaacttatcttatcttatcttgttttcctctgaactttcataactttcttaattttttctgaacttttccttttttccttaattaatcttctcaacttttctcattttctctgaacttatcttaactttttagaacttttcctgttcttttagaaaataagcaaaaataaggtgaatacaacagacccttagtcttcaatcacgaccagagaatatatttgctaacactacatttttctacttttcctccattataacttgtaaggaagggattgaaggtagctcactatccatttcaaaaaatgctagctacgcatactacaccttaagcataaagttcactcctgtttaacgagagtagcttgcctcagagagtgctctgaatcccctgtcccttgaaacattttcactgacaatgtctttaacagaacccagatcagaggtcaacaatccagtcaattcaccaacctgcaaaactaagaaccaaaatgttgaagttgagagggaaaaaaacatacaattaaaaaaacaacttatacaatacatgaagggtataaactgagagaatagatgtccatgaaacatgtgaacaatctaactcatagtccattgccgagatctcagggcatataaaaagtattgacagaaatatagaacacatgtgatcccaaacattaaaatgtgagataattgacccaagatcagctatatctgacagaaggagaaacgaaaacacacatcagttataatcatccaatgcacccttgtgctcaaaccatcagaagatgatcttaacatttaacaagacgtcaaaacatatttaggcgaagaactactcactagcatccagcacaaaatgttgcctcagcagtattaaaagataatagaaaatagaaataaaatagataaccaataacgttttaaaatggatccgcatatcccagaaaaagaatggtagtcttacttctgctttacaaccagctgattccaaaagtctagcaaagaagaagaatttggttataaggaagagttctcaactctctgtctctgtagacaaacggatagcattctatctaagtgccgccaaagtcactgaaaacaatgattgttgacaaacgctgacaatgaaatgctaagcgcatttgtattgaggataattaaattatgaaaaactaaagcaataagcactttataatctaaaaattcagctttccgaagagccaattaattttcattttcgctagtgatattgaatttactgtgaaatactcactccatagtaaatataaattgatgcatagaaaattggcacgaaggtgaagagtgttaaagtcaagagagaaaagtgggcgggtggttgggtgcgaggccaaaagtggaaggataagcttattaaactcgatatgtgagattcaatatgggatatcccatgaggcatgtataacatttagtgtgggaattgtttaagaagaagcacaaagacacacaaaatctcgacaaaaactacaagttgacacagctatagcatccaatcatcactacaatccatggcagaaacgatgattaaaaatctcccacagccatccaaaactttacgtgcaaagaagcctacagctccagagattgacaagaatataaaatatacacagtaccttgtagcggtcgaaaaactccacctgtttggaacaaaacaaaggcaataaagttagaattattgcaactaacaagttactacagtcttaaaataatgttactaatttcagagcagaaatagatcatgaattctaaaaacataaaagacaaactgctctaaaattatgtgttttgcggacaatgctactgcaaaaaagcaaaatgttaaagagtataagactgctttttcaggcatttaacattatctatggtggtcaaaaaggtaagaatacttcctgccattatgtagtatatgagtttgccaagtatggcagtgcggggccattgtccattttagtgctaacctcaaaataacccaagggtgagttcggattgaaggtaacatgttaagggtggtaaattggtaatagaagaagaaataaagagaactaggtgggtgaaggtggtgaaagatggaaatatgtaaagagtgtgacagtgtgtaaggaggggggaattactacactcattttgggggtcataaatacccaccaacctcctagggtaatacattaccctagataataaaatgaggttaatagtttccccttgcatctccccctccttacactgtctacatcatctatcctacttccacctaaagtcgtcttcattttcttcattttatctacattaccccccttacaacatctgtattactaacaaggttgcttgcccttttcactctctctcctccatatgtgcttgtgttgcaacgtctggagctgcccaaatttgggggtgattagaaagctaggcaccttccgaaaagataaaccaattggggaagccatgtcgatgtggggttggcagataataattattttatatttggatgggagagaggaaaaaaagtggggcaaagaaaaattaggaaagagatgttgttgagcaagctaagcattgagtaaaaacaaaaatggggacggcaaggaacgaagttagtgttaagtgaggtagaggaaagagagaatgaggtcgagggaggaaaggagagaacaaatacggccttgccttgcaacgtgggtgctcttaatacattaacccgatccaagcatcccctgagtatcaactatgcctaaatccagagcataagcaacatatggcatccatattggcaaggtcgtgaaatcttcaatgtaaacccccgcctctctttttcgtttgctgagaacttcatttccccaattcatctctcttctgcataatagaattgaattgcctaaacatgaagattgtcctaactaagcaatgataattatacctgcagctatactcactacagattataatagcaattctcgatgcacatatcatatgttagaaagactaccttaattccttgggggggacggatatgtactagtgcgcttaagagtgtaaaacaacaaattcagttatgctgttccatactagctgcaagtagcatgatatccaataacagctctattgaactaaccctcttttgccaccaacatattgcatttttgttacccctaagattttgtttactgaagtcctatatgtatacatgacccaattgcttcgctgtctagttagttgcaacaactagtaagcttacatagcatggaaagtcatagtgcctgatttctatcaaatgagttagaatatgcaatgctaccttttgaatcagcatcctcctgaaaatttgagctcttaaaacagacataaccttctcccaaattttgttcatgtttatgacaaatatcacggtgaaaatgggctccagcgcatatacaactgcaattctgctcattattttccacaaaggctcaggtactgttcctgaaagtacctcaaaaaacctccctgcataataccaacatatagtggcagataagagactagataagagcaaaaaccaaagtcaataaagtaaagtgaagtaaaaatcaactctctatattgaggcacccaaatagaagggagtagctaatgtgcacccatcaacattgccctgggtcagaaaagccaaatccccagtgaagcaccctaagctattgggtatcaactgctacagtgctcttcatatcatttgatctgaaaatggagagcatgttactcctacaaattacatataaaacccactctcagccatcttctttacagcaccatggcacccaggaggtttgggagctgagattgcaaggagatgaaactcaataggaatgttaagttagacagtggccagaaagtaataaaagttctctttctcataacaaggaaactctgctacaagaatggagtgctctctacactagtgatggtttaccctccagaggtgacgttactcctataggctataacaaaagatgggaaatctactagaggagattagaaattggtgtgtgcagtattcactaatagaatacatgtgatggactgctggggaaatgtccaacaacagcttctatagataagaataccacaaagaagatggattgccgtgctaaaacacatcttttgtacagctatggtgaatattttgtgattaattttcagtcaatctacaaaaggaacgagataaagtcaaacattcagcccctaatcgataacgacaagcctatgatcagtaaatagtggacacctgattttgacagcatagaaactccaagtaatacccttgtgagtgaggttttccaagcctgcccatattgcgtaatgattccctatagagggatttctagtgatgccgaagttccattgtttgctattggtacagaacagaagccaacatcgtctttgcttgtgctcctttacagtcaatgtcactcaaccattccctgcaaaggtgctggggcaagatccttacagtcaagaatttgggaaagttgttcgactgactccaaagctgctattctgcagttttaggaaaatggtggaacatgattgctgaatttagcttcaagtaaaacatcaagggcattgtggaacagtaaaaataatgagtggtttcctagggcaggttatgagtctatggtgaagaaatgtcctcccctcgaatattagaataaggaaaactttctcgggcaatcctcaagccaagcaaacagtcatatcaacctcgtaaatcgtgagtttataaataacccttgggttccagttacctctttcaattaaccatccttgtctctcataattcaatgttgtgagtttgtgacctactcttccttcaatgtattgtatacagtaagctaataacttgtcatttcgataattagaccactcattactatcaaagttacattaccattgcaggtaatgcaggtttgttgagggaacccccctcaattattcgaaaaacgacagggttaatttgagcattatgcctcgcctcggcctcgggttacttcccttaagataaacggtcaataaggaagcataacagtttctctgtgcctttgcttcctgaatctcatagtagtactaaattttatcaaaatccaacaaattcaattgagctacttcctccattctataataattgcaacacaactcattctaagacctctgtgataggagaagatagagataagataataacaaacaaagaaatgttgcaattaatatgaaacttccacatacagaaacgttgcaattaaaaaagaacggaggaagtaatcgataatcacaggtacaaaaacaaaccaaaatttcaacttcatcaaaatccagaaaatgaaataaagtattcttagaaaaattggatgatacctgaaaataaaggcatagagagagtacacgtggtaccaccaacaagagcagaaatgcaaagagcaagacgccatttttgttccatcaataaactcaagaaaattccccaattaatcgcatcctttgattcaactttctctgccctaaaattttcgacgttgggatccgggtcggtaaccgagtaatccgaagcgggtccgggtacgtaagctggtgaggcccacttctgcctcgggattgagaatcggagtcgggtggtgcggtggaggtgacatgaggagagagaaaatggcgggaagtgagattggatttgacggttataagaagggatgtaagtgcgcgtcagagttggggaaaggagagagattgccgccattggtgattgcagataactctgcgtaacaagactatcagtgatgaacaatgtctgaattatcgagctcatattaagactttgtttgtttgggcgtaaaacattttcagtataataattttcatgaaaaatacaattttaaaattagtttctgttgtttggtttcatgtaagaaaaatgatgaaatgaaaggaaaaataaaagagaaagtagtgagaggaatgtacaaaagagataaggaaaagagttttccctttcttttgaagggaaaatggtttttcatcattgtgagagtaattttaccctaagaaaaaatggttttacactcttttgccaaccaaacaatgtaaaactgaaaatagaggaaaatagttttccaggaaaacaatttacactctaccaaacggagcctaagtgacaattttgtaatcaaattactaataaagcttagatggtgtacactgcactagtatatagaagatagaacatggtgtgtatatgtacatgaataataaacttgaggtttgtttgaaaatgatgatccacttgaggtttgtttagcagatgcctctctctttttagcgtttgtttcctttaaagtaacttcacttgacttggccattagaattatccatcacataattcggatagaaatgaaagaatttggcttacgcctcgctctaatttaggagggacaaccctccacttttcccattcttgttccgtcttcttggtcgactactctcgataaatggataaacaagactgactatctcgagatcgctggataataatttctccctcacatattactaaatgtcatgtgcaacatattgtataaaccgatttgaatttcattccaaatgattccacattttcatattaactattgcttagaatagaaacaccatgttaattgaaaaatggaaacacatttgccaaccaagtttttaagatattgactaattcttctttcttctttttttttctaaccggaccctgtttgtcaagtttccaaacattgctaaccggaacttgtgcaacaaatcgatatagagcatcggggatgaataaataagcaactccaaatatgtagcaccaccacaaaagggtaggtcaggttaatagtaatgtgagagaagagaggtaagttgatgggtccaagtgaaactaagattttaagattgaaattgtcacttctccattttcttactacatagacgggctagaatacaattcaaaaatcatactacaaaacttgctatacataaatggaatcgagacaggatcaaaatggaatcaagaaattcatcatggacttcaccgggatacaacaaagtcaacagaatctgtgataaatggctcatgggggccatcacgaatactcttcaagacatatcgtttcaaaaggaatgaaggagtccaacttacaccgcataattgcataataatcgagcatttcctatgtaacatgcaatataaagggggaaatcgtgtgaacaagatattggtacaatacaataaatggttccactaatttggataacattctcacttgtaaccaacaacaagttaacataccggtatagtttgctacactcgagcaatgttgtaaaagatttatggccttctcaagtgccacatgcagagaacacaatgcctggattcttgacctactacgtggggtgtcgcttctagagcaggaaagatattcaacactttacgtaatatcttggataaaatcttgcacaatcctccatgtaactcaaaaaagaaacaatatttgtaatttcaactggaagcaagatcaattcatacaagaaaattcttgtagacgtagcaaaaaagaaatttagaaaacaaatatcaaacaaagatgaaaattcaaaataagttcaactttcttctttagggcatgaatttagacaaagaacaagtacaatcagacaagcaactggtctattcacccattccatctcgagaccatgataaaagttagtaggcatctccagtttttgcgatgagctcaatatcattagtcgtcttgaaatagattaattaacccacaaagaatattctcgaacaattattggttccttcgcaaagggtaacgactaataaacctacacttttcaaccgccataaccatctaaagaaccaccatatccagttgaggaccgaggtacctatgcgagcatattgccatcacaaccatttgagataccattataacacacacccatcctagatacggccacacgccgcaactatccaatgtaccaccacaaccactataaaaacatagaataggacactaatatacctccctcgagatcgacatataggttcctcgaacacaactattaaacaacaattcacggtgagaatgcaataatctaacatttaaaaagaacaagaaaaagaagcaagatgaacaatgaataccgcagacttatgtgttgcccaatgagaaagattcattatcaacagactcatataatgcttaggaaattcaaaagtgtccttgacttgtaaggacggcgtacttctacctagtcatcttctcgtcagtgaagtctagcaacaaactgcgcgcatgatcctctctccactcttttgcgaccttccgatctacacggtgaatgttgctgaattgtgtcgatatctaatcctttaagtttcacaatagactcaacgtggcctttcaaagtgtgcaactccctcagcctgcattcatacattatatggaactgtttatatctggataattcatgaaacaattatcatactacgcatgtcagtgctactctgctagataaattattagatgtttctccataacacaagagggaaaatagaagaaatcttgtggtttacaatcaagattaggtaaagtggcgatgttgataaaattgattacgtaggaatcaataatgttaaatgtcaatcaacttcataactttatgcatttgcgtatacctttttagaatatagttcatccaatacaaagctacaacaaaccttggttttatatgatatgaagcctttattgcataacttagcatgattttatcaatccatgtgatttcacaatcaaaggcggctactgaatcaataaaatcataatggtagtaattttcttcatgcaaacataaagggttaggtcttacctagaaacttcatccctcctctatgcttgttcaaagaatctcgagagagttccccgtaattgcttgctctcattgaaaaaggtggtggtaactgcaggtttgaagaacgtgcgggcttctttgttcggtcgcccattgtgcttctttctcttctcttccgtagtccttcttagtggtaaaagcagtctaagcaagacaaagaaaccaatccgagaatcaagagcaaaaccaataaagaaacttaaattgtttttctcgactctaacaaagaatattaaccttattgtccgaaggttgttccaaacccttccactcaagacatagcgaataatgaatttcagaacatcaagggatatgtaagtgaccggactcaaacccatacaacaagagcccatccccatctcatagctttgatccttgcaaagcgaaaattggcatagacagctatgagagccgcaatttgttgagtgtagcacaccaatatgttattaacgtcagaaaagcttttaagcaaagcaaaggccgaaaacatgtcgataatataaaaaatcccagatttactactactttgaaattgaaacgtccaaacatgtgtacaacaacgtcctaaaactaatgtcaacaacgctatattcatctaataaacagtcaataggtaaataaagtaaaataaacttaaagacacagtacaaagatgaatatttgatggaaaaacaacatatatatattgcatctcagagtttgctctctacctactatgaacattacttggaatacccactcccctgggtggtagcctattcagatgcaatgagttccataactcgtttccaccaaccaggaatgagatagcaaaccaaaacagctatataacgcaaatcagtttaattaaatcagaattttttacatcaatacacacgagatagcaacacagcaacaatacaacacaagctggcaaacaacaggaaaaaaacgaaaaattagagcaaaattgaaaaaaagaacggaataaatttgagtaatacctgagccaataaattccaggaacacttggatgattgaaaaaatcgaatcactgataatttaataaagcataggtcacagagcattaggtcgaatcgcaattgatgcaatcgaaggaagtgcaacaccattgtaggaatttcccaattaaatggcaaaattacatcggactaaccctaacaagataaattgacggaattagaaacaaaacaatcaaaactcacactcgaatacaaaccctaatatgacgaacaacaacatttgacgaacatgattatcgaagaatacaataaacaccgaaacttacaagtgaatttgggacaaattcttagtgattcgagactcgaaaattttctcggaacgattctcccgaaatttctgaaaagagaagcaaatgagcggttcgccggaaaaaccgtatcacaaaggaccaaaaggttagaggtggaaagggaagggaagaaataagggaagaggcgatgaagatgtggtatggaaagaggacagaggtgaaagaagagggaagaaattaggttagagaagatgaacgattgagaggaaagagatgacgagaagaacatcagaaggcaactaagcaaagcaatggcaaaacagccatttcactgtaactttgggtggagaagaaagggcaaaacagacaatgaactgttactaagctacagtagttagaagttcccactttttaatgggtaatggatgaataataaaccaaatgaacttatgtatatctctagtttttttttattcggtaatctaccggcttaaacaggttcaaccctaagggggtaagaaagggatcctaatcaataaggaaacttccaaagcctggaaactggagatttacaccaaaaaaaaacaaatatccacacaaatatcccaaaaattgggatgatgagagtagaactctcgaccataaggttaggaggtgggagctccaactattggactcctatgattcttatatacatctcttgttgaaaaagtgaataaattcaaaatctataatgaagaaagagaaacaaaagatgcaagagaattctagagagagaataaagaaaaaccaaaatccttacccccaatcggaattttcaaatccccccccccattgcaagctcctcccttgggaaatccaattatctaacaaaatcttttgctcttccaaatccccctctcctaattctgacccccgtagccttggttcacgttttttcgaaataatttcctctccttgcccctaccaatttcggactgttaataagaaacaaagcattaaagacaaattactaaaaggtaattatggcatctaatggtgaagagagtgatccgagttgttcttgagatccaatgaaatagtaataattatttagatttttttagggctatctaattacttgttagtaattaacaagcaacctttgctggccaatcggagcaaaatatgtcattcttctcatctctactgcattgatatcttctgcccaaggaagtatcttttccccaagttttttcaatcgattttgtttttattaagtggttacttgtttgtgttaaattttctaaattctgctattttctcttagcgggtcattgtatttggggttttcttttcatcatatgggctttctttatctctctcctcattttcgcgtcagctccttcgcgtggtcaccaaggcccttcaacttcttcccttaatgtggttgttctcctttgctactaccttctctccttaagtactctctatataaataaccctctcttcagttactccatcctcactcacttcattgtcttacaatcacctacttgtcttctctcaacccctcttgtgttcttttccatcctcatgtctgatatcccaccctctcccaactacgtaaataaatgtcctcaagtccgatagctctcatgatcccatttctccttacccgacctttcccaattcaactgccactgtggataacaatactagtccgtcaaatcccccaaccacccctagctctccaaacatggttggtcacggtaattgtccatctcccactcccactgaatataggatcctaagtcctactctctcaaacattccaactcccccggtgtcaatgtagtttccccgaccttcgaggattctgaagtagccctctataagtcatcttgtctccttgttaagatgtggggggaaccaattcccacggttgccgtcatcaatagggccgtagagactggacctttatccatggtgagttctctattcgacatatctctaatggttggttcttaatcaaaatcactaaccccctcgacaagtatgaagtgttggagaagagacattggtttgtccaaggtctgaacttcgtgcttatcctttgaaaatccttctttaaaccattcttcactaacatcacacatgttcatcaatgggttaaaatccatttccttccaaacgaacattggtcttggcctcacttagccacccttactcaaaacataggtcaccttatcaagcttgacaaattcactctccaaaataatgaaaaggtcatctttgttagagtttatttaaacatcaacatcaccaaactgattccgtaggtccatcactgtgacttccgcctatgattctctggatttttcctttcttatgaaggtgtccacgaggtttgtcctctttgtggatgtaaagatcacatgctctcccaatgccctaagaaccggcttctgtttggagcttgttgttcaagcttgaggctaacaacctcgagccccctccctcgcttgctaacaagcctagtgactagttctttgtgaagcagcaatgtcatagtaagccttgatttgcttattgcaccaccttcaaaggtaggcgtatcccggcttcaacctccaaccctcctcaagagaacactagcctcacttgtaatgagattcttcttaatcaatcctctcctactcacctcatggataatatctccacctccaatactttcgctactttgaacgaatttcaaatcaacaacgatgatagtgtgcaacttaatctacctattacgagccctattcatgataatgagatgattaagactaatatggacccttcgaaagatgacattgatgaagccttccttcaagctctaagtatcatccaccacaatccccaccttcagtttaatgcagatatgacataaattctgtctaatccgttgagccctacccactccaactccggcgatggtcaaaaaagaggttccctctactcctaactagttcatgattggtgtccttgtaatgaatttttttgttatacttatgagacccttcccattagttatcttcttcttgtatggctattttattttcctgtttttttcttctttttaagttttcttatggtatgagttaggtctcatatttattttgcttcagttttcatgaatgtaatgattaatcttaggggaaagaatgttttcttttgatcagttttcatgaatgtttccatattttgttttgttcagggtcccattaatgtttaattttttaatcgtgatattttaaatgaaccgtcgtaataggccactgggtttttctttctcttcttcctgcctctggtcttttgtcctcgttgttaattgtccccctccaactccttttcttcaaacgttcttggatctacgtgtgtccctcaactcacccatttctttcttagttatttcaggttgactacggacttgggcctaggccaaaaccggccacaactccactggtgtcttcacattacaaaatgaaggttttttgggccctttgattttaatcaa

1. A nucleic acid molecule encoding a polypeptide which is involved in resistance against Beet necrotic yellow vein virus (BNYVV) mediated by the Rz2 resistance gene in a plant in which the polypeptide is expressed, wherein the nucleic acid molecule comprises a nucleotide sequence which is selected from the group consisting of:
(a) a nucleotide sequence that encodes a polypeptide having the amino acid sequence according to SEQ ID No. 45;
(b) a nucleotide sequence that comprises the coding DNA sequence according to SEQ ID No. 44
(c) a nucleotide sequence that hybridizes with a complementary sequence of the nucleotide sequence according to (a) or (b) under stringent conditions;
(d) a nucleotide sequence that encodes a polypeptide which, via substitution, deletion, and/or addition of one or more amino acids of the amino acid sequence, differs from a polypeptide that is encoded by the nucleotide sequence according to (a) or (b);
(e) a nucleotide sequence that encodes a polypeptide which has an amino acid sequence that is at least 70% identical to the amino acid sequence according to SEQ ID No. 45; and
(f) a nucleotide sequence that comprises the coding DNA sequence which is at least 70% identical to the DNA sequence according to SEQ ID No. 44,
wherein the amino acid sequence of the encoded polypeptide has a proline (P) at position 25 with reference to SEQ ID No. 45, a proline (P) at position 72 with reference to SEQ ID No. 45 or a valine (V) at position 186 with reference to SEQ ID No. 45, or
wherein the nucleic acid of the coding DNA sequence has a cytosine (c) at position 73 with reference to SEQ ID No. 44, a cytosine (c) at position 214 with reference to SEQ ID No. 44, or a guanine (g) at position 556 with reference to SEQ ID No. 44, preferably
wherein the polypeptide has the amino acid sequence of SEQ ID No. 8, 12, 16, or 20, or the nucleotide sequence that encodes said polypeptide is SEQ ID No. 5, 6, 7, 9, 10, 11, 13, 14, 15, 17, 18 or 19, or the coding DNA sequence is a nucleotide sequence according to SEQ ID No. 7, 11, 15, or 19.

2. A nucleic acid molecule which specifically hybridizes to the nucleic acid molecule according to claim 1 and encodes a non-functional allele of the polypeptide, which interferes with resistance against BNYVV mediated by the Rz2 resistance gene in a plant in which the polypeptide is expressed, wherein the nucleic acid molecule preferably comprises a nucleotide sequence which is selected from
(a) a nucleotide sequence that encodes a polypeptide having an amino acid sequence according to SEQ ID No. 4 or a polypeptide having an amino acid sequence that is at least 70% identical to SEQ ID No. 4, wherein the polypeptide comprises an amino acid sequence having at least one amino acid substitution due to one or more mutations in the nucleotide sequence, preferably wherein proline (P) at position 25 with reference to SEQ ID No. 45, proline (P) at position 72 with reference to SEQ ID No. 45, and/or valine (V) at position 186 with reference to SEQ ID No. 45 is substituted with another amino acid, preferably wherein proline (P) at position 25 is substituted with alanine (A), proline (P) at position 72 is substituted with threonine (T), and/or valine (V) at position 186 is substituted with isoleucine (I); and/or
(b) a nucleotide sequence that comprises the coding DNA sequence according to SEQ ID No. 3, that comprises a coding DNA sequence which is at least 70% identical to the DNA sequence according to SEQ ID No. 3, or that hybridizes with a complementary sequence of SEQ ID No. 3 under stringent conditions, wherein the nucleotide sequence comprises at least one nucleic acid substitution due to at least one mutation leading to an amino acid substitution, preferably wherein one or more nucleotides are substituted at positions 73-75 with reference to SEQ ID No. 44, at positions 214-216 with reference to SEQ ID No. 44 and/or at positions 556-558 with reference to SEQ ID No. 44, preferably wherein cytosine (c) at position 73 is substituted with guanine (g), cytosine (c) at position 214 is substituted with adenine (a), and/or guanine (g) at position 556 is substituted with adenine (a).

3. A polypeptide which is encoded by the nucleic acid molecule according to claim 1.

4. A vector or expression cassette which comprises the nucleic acid molecule according to claim 1, preferably wherein the nucleic acid molecule is operably linked to a heterologous regulatory element.

5. A cell which comprises the nucleic acid molecule according to claim 1.

6. A plant or a portion thereof comprising the nucleic acid molecule according to claim 1 endogenously or transgenically as transgene, preferably wherein the plant additionally comprises the Rz2 resistance gene mediating BNYVV resistance endogenously or transgenically.

7. Seed or a descendant of the plant according to claim 6, wherein the seed has been technically treated, whereby the technical treatment is selected from the group consisting of:
(a) Polishing,
(b) Dressing, preferably pelleting,
(c) Incrustation, and
(d) Colouring.

8. Oligonucleotide or a pair of oligonucleotides of at least 15, 16, 17, 18, 19, or 20, preferably at least 21, 22, 23, 24, or 25, particularly preferably at least 30, 35, 40, 45, or 50, and particularly preferably at least 100, 200, 300, or 500 nucleotides in length, wherein the oligonucleotide or the pair of oligonucleotides
(i) specifically hybridizes to a nucleotide sequence as defined in claim 1; and/or
(ii) specifically hybridizes to a region in the Beta vulgaris genome that, in Beta vulgaris, cosegregates with the nucleic acid molecule according to claim 1 and/or with the nucleic acid molecule according to claim 1 together with the Rz2 gene,
preferably wherein the oligonucleotide or pair of oligonucleotides is selected from the group consisting of SEQ ID NO: 24 to 40.

9. A method for conferring, restoring or increasing the resistance to BNYVV in a plant of the species Beta vulgaris comprising the Rz2 resistance gene mediating BNYVV resistance endogenously or transgenically, including the following steps:
(i) integration or introgression of the nucleic acid molecule according to claim 1 by means of homology-directed repair or homologous recombination—preferably, promoted by site-directed nuclease—into the genome of at least one cell of a plant of the species Beta vulgaris, and optional regeneration of a plant from the plant cell; or
(ii) increasing the expression of the nucleic acid molecule according to claim 1 in the plant—preferably, via modification of the native promoter or via fusion of the nucleic acid molecule with a heterologous promoter that exhibits a higher activity in comparison to the native promoter—in particular, after BNYVV infection; or
(iii) increase in the activity and/or stability of the functional allele of the polypeptide which is encoded by the nucleic acid molecule according to claim 1 via modification of the nucleotide sequence according to claim 1;
(iv) transformation of a plant cell with the nucleic acid molecule according to claim 1, and optionally regeneration of a transgenic plant from the transformed plant cell; or
(v) and screening/selecting for plants or plant cells, respectively, in which a functional allele of the polypeptide encoded by the nucleic acid molecule according to claim 1 has been restored and/or the expression of the non-functional polypeptide has been abolished.

10. A method for producing a BNYVV-resistant plant comprising the nucleic acid molecule according to claim 1, including the following steps:
(I) provision of a plant of the genus Beta or a plant cell of the genus Beta comprising the Rz2 resistance gene mediating BNYVV resistance endogenously or transgenically; and
(IIa) transformation of the plant cell of (I) with the nucleic acid molecule according to claim 1; and
(IIb) regeneration of a transgenic plant from the transformed plant cell; or
(IIIa) introduction of a site-directed nuclease or nickase and optionally a repair matrix, or a site-directed base editor into the plant cell, wherein the site-directed nuclease is able to generate at least one single-strand break of the DNA or at least one double-strand break of the DNA at a predetermined location in the genome of the cell and the repair matrix comprises the nucleic acid molecule according to claim 1, or wherein the site-directed base editor is able to generate at least one single-strand break of the DNA at a predetermined location in the genome of the cell and to convert at least one nucleobase; and
(IIIb) optionally, cultivation of the cell from (IIIa) under conditions that allow modification of the genome at the predetermined location, selected from
a) a replacement of at least one nucleotide;
b) a deletion of at least one nucleotide;
c) an insertion of at least one nucleotide;
d) any combination of a)-c),
optionally by homology-directed repair or homologous recombination,
wherein the nucleic acid molecule is integrated into the genome of the plant; and
(IIIc) regeneration of a plant from the cell modified in (IIIb);
preferably wherein the predetermined location is in the nucleic acid molecule that specifically hybridizes to the nucleic acid molecule according to claim 1 and encodes a non-functional allele of the polypeptide or a position which is at most 10.000 base pairs upstream or downstream away from the nucleic acid molecule that specifically hybridizes to the nucleic acid molecule according to claim 1 and encodes a non-functional allele of the polypeptide; or
(IVa) crossing of the plant of (I) with a plant; and
(IVb) identifying and selecting a plant comprising the Rz2 resistance gene mediating BNYVV endogenously or transgenically and the nucleic acid molecule according to claim 1 endogenously or transgenically, wherein the Rz2 resistance gene and/or the nucleic acid molecule according to claim 1 is present homozygously in the genome of the plant.

11. A method for identifying a plant of the species Beta vulgaris, a portion thereof or a seed thereof comprising the nucleic acid molecule according to claim 1, wherein the plant is capable of exhibiting resistance against BNYVV mediated by Rz2, if present in the genome of the plant, comprising:
(i) detection of the presence and/or expression of the nucleic acid molecule according to claim 1, or the presence of the polypeptide which is encoded by the nucleic acid molecule according to claim 1 in the plant, the portion thereof or the seed thereof; and/or
(ii) detection of at least one marker locus in the nucleotide sequence of the nucleic acid molecule according to claim 1 or in one or more cosegregating regions thereof, preferably wherein the detection of the at least one marker locus in the nucleotide sequence of the nucleic acid molecule according to claim 1 comprises the use of an oligonucleotide or a pair of oligonucleotides, and wherein the one or more cosegregating regions are genomic intervals in Beta vulgaris on chromosome 3 which comprise and are flanked by marker loci detectable by means of
(a) the markers s3e5985s01 (SEQ ID No. 33) and s3p4348s01 (SEQ ID No. 27), and/or
(b) the markers s3p4351s01 (SEQ ID No. 29) and s3e2247xxx (SEQ ID No. 40); and
(iii) identification and optionally selection of the plant of the species Beta vulgaris, the portion thereof or the seed thereof comprising the nucleic acid molecule according to claim 1, which is capable of exhibiting resistance against BNYVV mediated by Rz2, if present in the genome of the plant, based on the detection of (i) and/or (ii).

12. A method for identifying a plant of the species Beta vulgaris, a portion thereof or a seed thereof comprising the nucleic acid molecule according to claim 2, comprising:
(i) detection of the presence and/or expression of the nucleic acid molecule according to claim 2, or the presence of the polypeptide which is encoded by the nucleic acid molecule according to claim 2 in the plant, the portion thereof or the seed thereof; and/or
(ii) detection of at least one marker locus in the nucleotide sequence of the nucleic acid molecule according to claim 2 or in one or more cosegregating regions thereof, preferably wherein the detection of the at least one marker locus in the nucleotide sequence of the nucleic acid molecule according to claim 2 comprises the use of an oligonucleotide or a pair of oligonucleotides, and wherein the one or more cosegregating regions are genomic intervals in Beta vulgaris on chromosome 3 which comprise and are flanked by marker loci detectable by means of
(a) the markers s3e5985s01 (SEQ ID No. 33) and s3p4348s01 (SEQ ID No. 27), and/or
(b) the markers s3p4351s01 (SEQ ID No. 29) and s3e2247xxx (SEQ ID No. 40); and
(iii) identification and optionally selection of the plant of the species Beta vulgaris, the portion thereof or the seed thereof comprising the nucleic acid molecule according to claim 2, based on the detection of (i) and/or (ii),

13. The method according to claim 11 additionally comprising
(A) detection of the presence and/or expression of the Rz2 gene or the presence of the polypeptide encoded by the Rz2 gene in the plant, the portion thereof or the seed thereof; and/or
(B) detection of at least one marker locus in the Rz2 gene or in one or more regions cosegregating with the Rz2 gene, preferably cosegregating with a chromosomal interval comprising the nucleic acid molecule according to claim 11 and the Rz2 gene;
wherein in (iii) of claim 11 the identified and optionally selected plant, the portion thereof or the seed thereof comprises the nucleic acid molecule according to claim 11, and the Rz2 gene, based on the detection of (i) and/or (ii) of claim 11 and detection of (B).

14. A method for cultivation of plants of the species Beta vulgaris, including
(i) planting seedlings of the plant according to claim 6 or sowing seeds according to claim 7, and
(ii) grown the plants from the seedlings or seeds, and
(iii) optionally, harvest root beets from the grown plants;
wherein the method counteracts an infestation of the cultivated plants with BNYVV.

15. A method of using the nucleic acid molecule according to claim 1 for the production of BNYVV-resistant plants, preferably of plants of the species Beta vulgaris, more preferably of plants of Beta vulgaris ssp. vulgaris var. vulgaris, Beta vulgaris ssp. vulgaris var. conditiva, oder Beta vulgaris ssp. vulgaris var. crassa/alba.
